United States Patent Application Publication US 2022/0167576 A1 - sequence listing, part 7

SEQ ID NO: 30 - DNA, 35937250 bp, Oryza sativa (residues 12,683,737-14,797,692 of 35,937,250)
  misc_feature (5969519)..(5970518): n is a, c, g, or t
  misc_feature (13681864)..(13682863): n is a, c, g, or t
  misc_feature (13684155)..(13684254): n is a, c, g, or t
  misc_feature (18795366)..(18796365): n is a, c, g, or t
  misc_feature (24815509)..(24816508): n is a, c, g, or t
  misc_feature (35936251)..(35937250): n is a, c, g, or t
gcgtgtcggctagaccgtccgtctgcttgttcttcagaaccccaacttatcatttgtattaaattcctatttgcaatatcagattgcttttatcttgttcttgcttgtttcttcgatttgcttgcaggaatagggttgatctgcaccggcaagatcaacaacccacggagaggtgtatcgatcgctaaggcgcaacacaacgtctcgtacggttgtagtcagatcgtcaacgtttctcccaaatcgtagttatcacaactcaccgaaagatcgggccaacaacagccttgagtgtcgagaggaactcagggttcatcaccttcgctcctcaaagttgtgcctgtcgccacctcctcctcctcctccttccacttcatcccacactatgcgtgaatggtgtgaggacactagccatcacgctcgcctgggatagcctctaggccacagcccacatcctcgcactcctcggcttctccctctcctgcacctacacctgttgggatggcgatggctgcccctccttctctccaatcgggggcgaccggattaatcgccgcgcgcatgggggcggccaaatctgccacagcgcgcggggcatgccactcgacgactacagtagtagtggcagcagcgacctcctctctttgtgtgatcaggagctgctcgatgcctcggctcgaattattttttattcatggaacctcaaaggtgttggttccaaaactggaacctttgattcctccttgttagtggaacctactaggtgtccgttatgaaatcttgcatctatgtgtggttctcaaccggtacctactaaggtttttgtagtagtggtaggattagaatgtttcaattgacatcagcaaaatatacgttatgaaataaataatttagtcgtcaaaacattcaaaaaaaaactttgaaacacaataaaaatataattctaaaattttgccctaacacgtgaaatataaattttaatagttaaagcacatatatttctttcatcaaagtataaccatcttattataaaggtttaattgtaaagaatatagtggttattcataccacaaatcaggtaagaaatcttatttaatttcccttcataaatatatggatgaaaatgaaattcccaatgggacttttcagttcgaagacttttgatgtatgttatcattagctatcattgtcaaaactaaagtcataacgtacaatgcttcaagatacagatagtgtcaagttcttttgtttgctagacaaaacaataagtaactttgaaatatggcaaattttattttaggacaacgtgagtttgcaattttagctgtagacaccacaagagtaaaactttcagttgaagacactatgtaaatatggtaattagccattagacatcgcccccaatatttttatgtatttggcctgacaaaacaagagaaggcctacatttatacatggagagaccgaaatgcctacatggtatttggctatatggagttggattggttggaacatggcctgagccatcagtcttgaagacccacggtggccaagcacatctgtcatcataccgtgatggtggtgataacatcaaggtgaccactttctccatggtggccacaaggcgaaggtggtgttgaccgtgatggccacgatgaggcgtaggtggccacaaccgcatgatgatgatatattcttcttcgttttttgcctcacgtggtatagtgggagcccggagttcctaggtcagcgatcttcctcttgtgaaatgcctgttttgcaaggacgattccatggtagtgggatcggacaatatgtaagcaatttcccccaagtttctagggctttcactacatttcagctttaggaatttcaatttgattaaatgtgtgttgttgttgtgttttgcaaactggtgcacaatgtaattttttgatgtggcacgaggactatgttgtatagatggtgaagaaagggtggcttcatgctacagtagattgcaatgcttcatgctacgtcttgatgcttggagtagactggatcaatggcagcatggtcgcacactaagtgcttgatcagcattccgcgacagctcggacataatgtggtgaggtaaagctttagagtattgatgtagaagtgaagggtggatgatggtgaacagaggctagggtgctatttataggatggctggcaaagggcaaattggccttggccatggccatggctgtcggcatctaggaatggaatttctgaatacccgaagcataaaccgtctaagtcccatgattagtagatagtacatgagtccacaacctgatcatcacatccatacataatatgcatacaaatagataacatggttcacataacatagcgagtgcataagtcatacaatataaatagggtcgaccagccaaaagaaagagtttaaacgtagcataataagaatagcaaaatatcattttggtatacccatctaccaaaccaacccagaaaccgatagggaatcaacctagaaagaaccatcctcgaaacctcctacacggtgcaaagtactcgtccctaagcatttcacttccaacatcaatgtctaaaaaaaaacaataagaggtgggtcaatacatatgtattggcaagtactacccaaaccatgtgaagtatatgtctattgcaagctgagatcaaaggaggttatctttgtagactaaattttagcataagcaattttttattcgcaatagtaataattatatattgcaactaaatttgtaaagcaacaagtaaacaataatagtaacataagcatcataataatatcatacttgtgcactccatggtagcaagtaaccatttcattctcagctaacaccgggcaaaatcagcactgaatttacaccataccaatttcacatatcatttcaaaaatcaccaacactatacttgtatcatttcaccaaatcgctcatgaccatgagaacagttaatcaattagtttagaatctgcagagtttgtataatgtatccatatgacacaaaatagtaatcatgcaagcatgccacgcgataccgaaaggtacctgatttaacacttgagatgtagttgttacattcctcaaagtctagccttgcatcaacaatggtgagtgaaaattcacactaaggcatatgacctagcgttgttaggtagcggctcacaccttaaacctaacgccatagtggcaacccaatggttctgcgtgccgtattggacaaacttagacgcccatgccgtatcctgacacatggggtaactcctttgagttaaactcaacacaatagaatcatcatcaacacacatcataactcatattacttcagcctaccaaaatacaagcctagtcaataagcaacttagtaagctaaggttaccccaataaataacacatgtggttgcatgatacatcttagttggtgacacatagtttagtccttaatcgacccagacgaacactccccctatgtcacgccctaaaaatcccaaatttataaattgttgtttaaatagaattataagaaatgattttaaaagcctagaagaaaagatctaattttaagtaataaattccaatataaaagtggactagataaaattttattaaatacttctcttgattctatagttcctagatttttctgggatttatttgagccaagaaagtatttttaataaatggaattgcatttcatgaataatttaaaaggaaaaaggtttaaaaatccttcttttggatttgggccgaaagctagcccaagtctctctctccccggcctgtgcgcgcccggcccaagccggcccaccaagccagtccgcccctctctccctcctctctcccgctgacaggtggggcccacctatcagggtcgtcttccacctcccgccgccagccgcgccctagccgcgcgcaagctgccgccgccccttccaaattcggtcgcatctttcccgatccgatcaaattgatagagggaaaatgatcccttcgatctcctctatcttttcccctatagaaactttagctaatttcgtttggaaatcgtcggattcgagttcgattcagattcgatttcttccctccaaccttaaaccttccatcgcctccgccagacgccgtgggcctagccgcagcccctagcccctataaaaggacccccgagacctccgctgttcgtgccaccttcgccttagccctccaccgccggtagagctctagccgcgttagcccgtgcgccgccgtcgccgcagcaagtccagccgtgtgccctcgccgctctggttgtcgtcatcgcttggggaggttgctgtcgggttcgccaagtcgtctctgtcctcgtcttgtcctccgtttccgccgaagatcgccggagcatcgcagtcgccgtcgacccgaacgtcttcgccgcctcgacctcgccgtcgtcgccgtctgttgccgtctgtcgtcgtcagagccctcggtgagttcgccgcgtcgccctctacccgtaggtgctgtccgtttgcgccgctgcgccgtcgttcgccagcgagcacgtggtgccgagccgccgtcggcaatgacgtcatcgtcgacgtcagcgccacgtcagccgtagacccgcaatagattagatcgatctcggccgttcgttttgtttagattagatctcagccgttcgttccgtagaccgttttcgtgcacccggtccaccgtaaatccgagcccgctgacacaataaatcattttttccttttcaaaaataattctttatagcgtcataatccaattaaaatctatataaatgatttaatccggtttaatcttaaaaattcataactaattcatcttagctcggatttagttggttcaagtctctaaatttttctaaaattgagatctacatgttaaaaatatccacatgtgctgtttatgattgtttatgtactgttttggtgattttggtcttttatgtttagattccgatgttcccggagagtccgattttgcaggagaagactttgaagaattccaaggccagcaaggcaagtcacacatatcccaaacaaccctttgagcatgttgatccagtttaaagctattgtttctattcaactattgcatttatttttgaatgtcaccgggtgggaacgacatattgcctttgttatagccctttgttattgatttcctatactttgtcacctggttaataattggattagctagaacattatatggttttagctaaagtaattaggatgcttagccatgcttagagacgctagctcatatgaatgggataattaatgattcactattacttaatgatggtttaatggtagctcatgatggttaatcatgataagatgccaactaaaacatggtaatagtgggttgtgagcacatggttttgatggtcgtgctcatgacaattaaggaccggttcacgattttcggttgtgaaacattaaccgtgccaaccacaagccagcgtgggcaacggctttaccttttgtatagtgtggttcatcgcgaggcaccagactgagaagtggcgaagataagcccacgggggtcgctagggagtccatgccttgttttataagtgggtgattatgatacaggaatggtgcactgatttgaattgtgctatgcggagggtattgtcacaatctctattcgggtacttgttaagtatcgcgacgcatggttgacatgatgttaaggttgtgtcttgtgggtacagtggtacacctctggccatagtaaaactattcgaatagtcgtgcctgcggttatgggcgggtctaacaatgtcttttgtgattagtctcacacctcttaccataataaatgatgctataattggtaataacttgtttagctcctggtttggaatggtatattcctggtttggaaatagaactgggcagccgggaatggttgttcagaatggttgggcctatgcaacgggtatgttgtatagcgttggattagtattatttaattaaatactttactatttttctaaattctgaagtatttattgaatgccatttatgcaaatgagactatattatgccatcctttgttatcccctgcacttgcatatttgctgcgtggcttgttgagtttgtcatatactcaccttgcaatcattcatcagaggaggagttctacagtgatgctgaaggtgtggaggattaggcgtagccctggtcaagctgcttgtgggatggagttgtctgcgctctttattttattttccgctgcttagatctttattgtttgagaggaactatctacctctgtaatgactttatattcacctattaattggaataataattgtactctattatcaatttgttattgtgtgcctcggctgattcctggacgagggtttacacgcatgtaagcgtttggagttttgcatagaaattccgggcgtgacaccctatcaatgtgcaactatcaccttatgcacatcacttgccacccaattctaaaaccatcatttttagtttttattttcacaaataatagaggcaatacccctgtccaatattatcaaatgactaatttgaaagagtgaatattgtgtcattgatatccatcaaaatttctaggcatggctaagcaatagctatattagtatctcgaatatactaaaattggtacttggacactactacaaggcatcctaggtatatcaacaggaatatgaacaataattcaaggtggataatgtaacaagtaggagttgttctatcggtacccaattttttcaacatcgcatacaagttatagacaatattgcattacgaaaatatagacatacaacatgatcggaggaggaattgaataggacttgccttactcagtgaactcatcacaagtatcaggttcgtgctcacactcctccacggctgtaactttgtcgtttattcaaatttaaatgaaactcgaatgaacaccaaatattaaaaatgctcaaacatgcatggtactagtacagtagatataggatgattttagataaatttaggtgaaaaaatcattagaatctgatttcatacgccttagttataaagctttcaaagtttaaaaatgctgaaattgcaaaggttactattcactatttgaaaattcagatttagctgtagatctgccctatatttgtcaaaaaatttttacttaaccacacgaaggagaatattatgaggatcaatggtaatttggttcactcaaatcagggtgaaaatgaattctctatgatttttcaaagcttcagcaaattacatatataattcacagaaattgttttctcaaattttttagttatttattaaacatctacttcaatgcattacaacttcttcaatttggtcttttttttttataaatgctttgaagtggtaagtagtggcatatgtctattttttgtcaaattgtaatggcattataaatgctttgaattataaatgctttgaatggtgtgcaggcctggactggcaagtgccaacctacctgctgcgacgccagggcttctctgttctgtactctcgccgtccctaaaaaaatctcaatttaagttagaactagaaaatgagcgtgcccgttggcatggatcttgtttctgttggctcatgttgacttcatgatgatgtagttaaccaaaatctcttgttattgtcacacaccttcactcaaggaacaacaatgatcgattaattgcacttcctcacgttacttcaactttctccatcgaccatgagagggcactagaccattcggtcgataagttttcacatgaccataccagcctatgagggcactcgcagtgcgccatcagaaatggtgcgcctgagcttggggctgggctagagaacaccaaaagccacttatctacaatgtaagtgaccttacaagtagcttatagtgggacccaccataccactttttccttttcactttccctccccctctctctcccctctcttcctctcccctctctctcccgagcggcggggcaacggcggggcgacggcgccgagcggcccaagcggcggcgagccaagcgacgatggcgccaggcaccgggcggcgtggcagcgaggcggtggcagggcggagcggtggtgggacggccagatctggccggacttggcctcgggcagtgacggtgacgggcggcacgaggacgacaagctcgacggtggcggggacgatggtgccatctctccaccaaccagtggggcacggcgcggcaggagattctcggcgcgcgaaagggggcagccgtggccggcgtcgttctcaagctcctcgccgtcggcctcaagcttcggatgtgccgagctttcttccctccctctctcccttccctggtgacctgacaaagctgccaaattttgctgaagaacgtgtgtctcactttggtcacttggtcctgggttggtcacaggaaatgctgatgtggctgagaatctcctacatgtaagctcgaggctgaatgacacgtaagcccactgtgaatggcctgagatgcgttcaccacttcaccagacaaagcgccgcatgtgaataatccaaaatgtgggcatacatatgcacgctgattcacaaaacaaacgttgatgaatctggtgccacacaaacaaaacttcagaggatattgcatctactaatagactagcttcgaggcttggatatgcagaagatacttgccacgtccagaaatttagccaatttccaaattattttttatgtaataaatccatgtccaagaatgaagccagtgtacacaaaatgacaaattaatatacagatccaaacgcaaataaagcataagtacttatagaagaggtgcttagtcggttagtcctcacacagtaaagaaaacagcagtagaaagggacgataatagcgatttttaattaaaaatcattccctaaaaggaataataaaatttattaaaattcaaaaagaaattagaaaacattaaaatacatacaagaaaaattcgaatgttacccggattatttttcttaaattccccatgttataaaatgtctccctaatttttacatgaattttaagaacaccagaaataattttaatgcaacaaaaaataatttaagatttaattaaaatagaaaacctaaaataaatcccctctcacccgttaggcaaatccagcccaaagcctctctcccctccctctctttttggaaaaagtacatcaaaggtccctcaacttttcatcgagtcacaaaatcgtccccaaaccgcaaaaccggatacaacgcatcccctaacttacaaaaccagtgcaaactaggtctctcggcggtttttaccctagttttatccgacgtgacagctgagtcagcgtgagacccacgtggaccccacatgtcagatgccacatcagcaggttctcttctccctcctctcccttcctcctctctctctcctcttctcttctggcaagtcggcaggcggctagggcagaggccgctagggcgaggcaggaaaggaggaggcgtgggctgcgatgctagagaaggcgagggcagcggcagtggcgaaagcaagagcacagtgccacagtactgcgagaatgctaagccacacctgacatgcagagactaacacaacaactgccgaatcaagcgctcccaactattgggcggcaccttgccacttttcgctgccggcgatgccggacttcaagaacggcgtgccgccttgcgcgccaagcccggacatatgcccgctgccggccagcgacgtcgagtacctgaactcgtagccgccgttgccgccaagcctcacgatgggctccccttcatagctccttgacagcatgtggacggtggagaactgctcttgccagaagcacgccaccttgccaccgacggaggcaagcgccgccgagtgcccgacgttgatgaagctctgcgtgccattcggcaccgcgttgccaatgaactccgccatcaagtgtggcccgttcgtccccgtcgatgcggaagccgccaccgccacagccgctacatgaaccaagaacgacacagcaacgacaaatgtaaccgatgtagctgagtcaagtgcattcatacaaggcggcggcatgatcgatggaagctaagctaaggtaagctaagccgtcgctgccctcgccttctccagcatcgcagccgccaccatcgcctccacctctcccgcctcgccctggcggcctcctcctcagccgtcggccggcttgccagaagagaagagaagagtgagagagaggagggagaggagggggaagagaacctgcagatgtggcacctgacatgtggggcccacgtgggtctcaagctgacccagccgccacgtcagataaaacaggcatcaaaaccaccgaggaacctagtttgcactggttttgtaagttgggggatgctttgtgtctagttttatggttaggggacaattttgtaactcgataacaagttgagggacctttgatgtacttgttcctctcttttccctccttctccctgggccgtcccacctccttctctccctcccccgggctgcctcggcccgagccatcctgcccctcccgcctgagccgcttccctcgcgcggcccagcgccagccgcaccacccacacacgcgcgacgcacgtgcgctgaccgcgcgcctcacgtgggtcccgcctgtcagactcgtctccttcctcctgccggcctcctctcctcactcccgtgaaaacctgcctgagtcctccccaaaatccgctcgattcaaacagataattccaaaattaattggaacggctgtgcctccatcacccggaacggctgtgcctttcccgaccaccttccatggccgccggccaccattctcggtgctggccccacctctcccgtggccggctcccctccggagcctataaaatggaaccccctccttcccctctcttgtttttgcctcctcccgagcttccctgcggccacgccacctctccacgcgctcgtcttctctctccgccgccgagcgcgctccagccgcctcggtcgtcaccaagcctctccgctttctctgctgtgttagaaacagccaagagaatcccagcagccggttcccgtccgtcgaagcctgccggaagctccccatcgtcatcgcccgcgccgcctcttcctcggtctcgctagcgccgactccggccgcccctaccgccttgtcagtgcgccggctagctgcgccaccacctcccccgacatcacaacgctttcctctcccctggcctgccctcggtttcgcccagagaccgccacgtgcctggtccatcctcctcacctgagcttcttcgatcggcccttcctccttgcccgtgtgccgatcgaccacaccatcaccacccctatcatcgcagtggcaaggccatccccaacctcgcctccacatgggacgaatcttgctagccattgtcgtcgtcaacgttcgtcctcgcccacgtcccatcggccggccgtttcttctcaccggctcgtccccccgctgtgccgccatcatcgtcagcatcgccgcaacacattccaccttggcctcgcctacggctaacattgtcctcctccaagtcattcccggttgtcgtccttatcgtcgtggcatccctccgtcaagcaaatcccgttcgtcgtcctcgttccgtcaagggtgctgcagccccgttgtcgtcttcgtccttggctccgcgttgtgccggtctcgtctcaccttcgtcctagggtcgccgcccagagtcgtctcctcatcgtcgtcagtctaccctgagccgcatccgctgtgcccgttcgtcgtcctcgttctacgcctcttccaattgtggtgaggatccctccttcactcacccgtcctcatcccctcggtgtcacccccgtgcccgtcatgcagttgtcggtcccggtactggggtaccagtatcagcaatcgtttgcacaagcttcgcgtgcatgtgtggtgaccgtgtccgtgtgcccgctcgatagctgcgtggtgttcacgtgtgcagcccgcatagtgtctagtggggtccgtttatcggctactcgcttcggttgacacgtggtccgcttccgtcggccaatggaccgtctctgtgtaatcagtccaccatggtcctttaggttgatatgtggggtccataggtcaacagtgcaacctttcctttcttttctggactagagttacacatgttttatagtcacaaaacttaattacaatagcccgtaaatctccatataatagcattaaactttggatgatcatatcttggtcatacgaactccaaatcgatacctgggtaccattatcggcaatcattcgcacagccttcgcatgcacgtgtgatgaccgtgtttgtgtgcccgctcggtagccacgtgttgtccacgtgtgcagcccgtgtggtgtctagtgggttctgtttatcgaccactcgcttcggttgacacacagggtccgcttccgttggcccgtggaccgtctctgtgtactcagtccaccgtgttcctttagattgacatgtggggtccacaggtcaatagcgcaaccttcctttcttttccgggctggagttacacatgttttatagttacaaaacttaattaagctccatataacagcattaaacttcggatgatcatatcttggtcatacgaactccgaatcaatccgttcaagtctcttaatttttgctataatctaaagaaccctgtgcttttatttttatgtattattattgcttctttatagggtttagctttgcttgggtgcttcacgtagctcctgtcattctagaggttccgaagcgcggttcgtgttcggaagaccgttccctctaagcaaggcaagtcgtatcatctttgagcatattgattcccagtttataaaattattttgatttaaattattgcatttttctttattaaattcttacaaataattgttttacttatccatgcctattattccttgttatgaccttattactcgttattgttaagattatcactttgacaatcctaggtaaataaaaccctactagtgagaactctatagatcggcactcactagtacttgctagacttttgtttagccctgcttaattagaaacccttagatgttttacagcattagactttgggagttgtttcacaaacatcattggatacattggactgaggtttaatgacaagctctggacacactcttcccctttcaaaactcccaaaatggtttaggctgggctcgaggtgcgtggcttggttttgatagccgtaccttgggtgctataaggattaagctcgagcctctgttgcaaagcactatcatactaaccacatgtctaaaatgggtaaggcttaactcggtgctcagtctagtcatgaacaaaaggacacgaatagagatggctaaagtcgggtgatggatatctctgagacaaatgaaggttatcgggcgagtatttcgataatcaaggtgtcgtggcataggacgggcatctcggtggccactcctgagggatgttctgatgttgtggggctcaaccctaacctacctgtcccgggataccggccgtaggcggagttgcgtcggtacttttgttcacaactaggatgggtgaagggttatgccacgtttttatgatgggttccaattgcaatagaatgcagagtaaaggtgtttcttctgtgtaaaagatgtacacatctaatcagagtataatctattcaaatagttgcgccctcggctatggccaaggctagcaatgtacccaagttagtggtttccctcttaaaacttggttaatcaactaaaaacctggaatggttggcctaggttgacttgggacgagctggggcctggctataaggctgccagttcggtctaactcatcgtaggcccttgggttaaggcaggttcgtgtgggttcacggccttaattaataatcttaattactcttatggttagatttacaaatttaccttgggcaactaagtgatttaaaatattgttttactgcaaaactcaaccatataataaagatgtgtcttttgtatcatggttgttgaagtgtagcgttcgggaaaagtattttcggggcacgacacctagcaggctttagctccactccacaagcagaactcaactgggtataatccttgatcctctaacaccatcttcagaacagaaacactaaacttttgaaagagaggaattatagcaaggctgagtataaccagcgtactcagcaaaccacaaaccacaccaataatgcattcatgcaaggggagacaaaaggaggtttgtgactatttgcataaaggcggttgtaaacagttgtagtttaaaacagtaaatttccactgaataaagctacaccacgttgaacaggcccaaccaaccacctgaactatatcagttttttttatgaggaaacagtaggagaggcttctactgtaaattagattaaagaatgttaattacaagagactgtacaggggaaaggggaaggaatcaaaattacaaattgccaatctatgtttgccaggtttgacggtcttgatcctttactctaaacaaaagaagagtaaaatcatccccaaaaagtagtttacaaagattgaaagaaggtgtgatattgttgaaaatcaggtcattccttcttttccatgtgttccataacgcgatagcaaaaacttcaatgaagaacggatgtctaaaattttgctttgctgttaccaccatgttcatgaattccagtttgtagcccactgtattccgacgtaatttcagcattgaactgccaaaggacaattaaagaataagtgcagcacatcttctgtatgaaaagagttgcatattacccaattagttccttatttagagtggagattctttctttgcagaaggtctcgtgtttgaacggtccatcaagagtatccaatggaagaccttgagtttcattgtgcatttgctcttccaagagggaaatgagcgaaaaagagggaataaaccttttttgtttcgtagcatacactgttccaatccattgatcatggagatttgttatagttgtgttttaaggaatgtaatgaggatcttgccactcaagtgctgcttgtggtgataggggcagatggaataattcattcagattgtgtgtattgagaaagccaaatcaagcagaaacacaatttagaaaaatctaaacttcggatcaaataataataaatattgacataagagtccatgtagaaatacaatttatggaaaatacaaaatttgtattaaaaactaaaaaataattgatactgagacaagaatcagtgtataagtacaaatttatatctgaagtttagtttaaaaatatatagtattaaggaaaagagtccacatagaaatacaatttggaaatatctaaaattggaattataaaataaattcactctaataaataaagtggagaaataagttcatctaattcatatttgaaacaagtaatattaaggaaaagagttcatgtatgaggacaacttagaaatattttaaatctaggaaaataataaataatattgggagtagagtctatatttttatttatattaattggaggatttactaggagtgacacattaattctagaaggtaaaaatacatagaagttttcattttaattgaaaattctttgaattcacatgttaataagagaagcaaaaatggcttgattgtctaagttgtataaaattacaactaactaacagatgagattggatcctccaaccctaaactaacgtgacaatgaaatgaaaaagtgttcatttacttatctgaaacggtttataaaatattatgaacataagatacaatatatcatctttagtaggtacaaggatatcactacagatagtgaaaagatggcactaataatttaaaactttataagatggagggaagaagaatgaccttttctatagcatttaacgataatcatccagctaccatggtttataagtatattgtattactaaggcagtactagacagtactagaggatccatcacgttgcttgatggacataagacttaccatagatatcagacatataaaatcatattggtcaagttatgcagcagtttaaaatcatattgttgtttttagtattattttaataataaaacatgaaagtatatatgctattataaatatatatatacagcaatgctagctgcgtaatctacaccaactaccatactagttccataacaaaagagaagaaaatgctcagctgcagttgctttcaaataaaaggacaccatggtatgaaaggtgtccaattagtaaaagtgacatatacaacgcagttacagtatgttcctatcacattaccgaagtgcacagacagtcgaaacagttacttcatctaaaagttatatcatcaagactccaacccaaattcccttccccgaacctgaagactgcgccaatatctacgtgactacacagctagtggtagctggtttatctaaatcagctaccacttcatctataaaagataccatccacctatacttcaaatacaattttctcttaaactactcatccaatctacgatccgattacactgttgtgttcgtaataattaaatctttacaacaagatctcacatgattatattttaatgaaaaatcacaaattacttttatgatatgtctaaattatttttagatttcactaagttacttcttagacatacaaaagtaaattcagtaaagcttaaaagtaatttacatatattatagaagtaacttataacaaaaagaaaaagaaagtaactttaattaatactttttttcattgaacaaattatcatatatataattatcatatatatataagttacttttagatttgattaaaatacttcctatacatttataatgctctgaggtgattacttttattattgtttttagttaattctataatttgtgctgattaatttaatttttagatagagtcatgtttttatctctacaacggatttacttcaaatggcatgccgaagttaccttctttttgttctaagttacttctataatatatgtaaattacttttaggttttactgaatttacttttatatgtctaagaagtaacttagtgaaatataaaagtaatttagacatatcataaaagtaatttgtgatttttcatcaaaatataatcatgtgagatcttgttgtaaagatttaattattacgaacacaacggtgtaatcggatcatagatcggatgagtagtttaagagaaaatttcataagaagaaaaaaaaaacacacaacctaatagaaaaactacttgcatgcatgtctataccgctactggtacttctcaggtaattgtctgcatcgctcgttaagtctaaatcgagatgcctctcgaaatagattttgcgcgccaatatgtagagcacaataaattttacatggcatccaaatatcaggtaccgaaagatcttctaaagagaaggagcaattattaattttcaaagattaagtagccgtatgaggtcatataacatgtacaattaagagatattccgaaatcaacatgttgtgttattgtctagaactactctcatccattttagaagtccgcatactgtcatctgtttatattattaagttcaacaggaaaataaattctgtatactttcatgaatcatagtagaaaacaaaatacattggatctttaatctcctttccctatctgtatttttgttttagttatttctttcttccattcacagattaaaaaaatctaaattttagaaaaaaaatgaaagaatgaagaggttcaatagtttacgttttggcgactgattcctccttttgataataacttccatgtactaaagcacttcacaattttgtaaaccccatcatcagcttctttacagacgattttcacaacttgaggtgttcagatattgcagctgatttcaccaatgcattatgtttctatcatacatttagctttctgaaaaaggggaaatcaatttcactttcaaccaatcatgtacaataactttgactgtgcactagtgcagcaattgtaaaaacgtataccttggaatttcgaagagtgagcttatttagaactggacattgtttgagaatacaagctagaggccacaaatcagtggcaacacaccactcattgggtatcaaagtcttcaacttgctaaacaaagggcaccatcttaaaccacttctgaaaattcgctagctaaagtgcaggcgagaagatcaactatttttttatgtgaatacaacaatttgaatgtcaagatagtagcaatgcattaaaaaagagagattgttaaaatgtcaaaatgatgaatatagttaagggaacagaaataaggcgcagcaaataacataaaggagataagatgttaacgtaggcttaccatttcaggtccagctaccaacttcaaactcttagcttttgataatcctcccaggagcacacattggcactatcattgccagtctcacctagcataccatgacaaccatgacagttttcatcctcacaataaccagagtaagtattactacaacgatcatcacaattctggtgaggtgtaacaattgctgcaactaatgatggcatgctttccagaaaaggtgtcctgccctagaaaccttcaagatggagtccaacgaggcttggtgcataaatgtgagtgtggtgatactcactgaactggcagaagtagaagcaaagatattctattgattggaacacgatcttctttacagaatcaaagcagcaatgatcagagaaagatagccatttcaatgcagggcagctcgagaagttaaggaaacactcctttaattctagactagataaatctagcttcctcaagtgccgtgagacaagaggcatgccatctgtaaaatcaaaggtgtttttgattattattctgggatgaacaattggcatcggagattattggttttgttatttggaatttattcacgaagtggttttggagatgattggatttacaggtgaatcgcaggtttgttagtttatgtgaccggtcagatcgggcagtgtgtgccggtcagaccggcggtgatcgtgccgtcggaccggccagcccgtggtctgaccggccgacactatatcggttttggtttcgggttgtttgtttggatatctgagtttatttcatgattatggcttctagatggatactatacgtgtgtaatattgttgtttgctactaatgagtcaagttggagatagcttggtcttggaatatggtttctttgtttttttcatgtgtaggtgacttgatgcctcgggagagtatttgcggtgatggaccgggagtcggcttggggataagacgacgtccgtggtggtcagagatcatgcgggatacttatgctagagttgatgcatgtggttgatggagattccatatggcatatgatggaggtattgtgtgcgtatgggatatggagtcgaatttggaaggagtccaaatttggtacgattggttatgtagagtttctttcttgtactagagggtttcctaaggtgtttagaactcctagtatgagtttggttcgtggctttaggctgcctacctcatgtataaatagtgggggagcgtgaggctttccggtatcgctttagagagcaattgagttgagttttgagttagggtttcgagtttagtcgaaatttttgtaaggagtgctgttggtgcactttgtaaacacagagagaatcaataaagtcatcatctactttgagagttcttcaatttgtgtttcaccgggtttcggcggtcagaccggcgatctaccggcggtcagaccagcggcaagcggcggtcagaccggcggcggcagcaggcgcggcaggcgacttcgacggttcgaccgatcgatctacttcggtcagaccgacgctcatcaggcggtcagaccggctcaacaccttcggtcagaccacgatccatcgacttcgagggtaacttttatttccgctaaaagtttttagtttttgggtgtactaaccattcacccccctctggttggcttagttcttgtgattcgatcctacaagtggtatcatagccttgttttcttctttggatttttatcgatatggaatttttgccatggctactcccgctaggttttcaactaagcctcatgttttcgatggaacggatttttctcattggtgtagtagaatgcaatcttacattatggctgaagattatgatatttggagaaaagtttctcatccttatgtgattcctgaagagattaatactgttgctttaaaaactaagtttgaacaaaattgcaaagctcgcaatattcttttgagtgggatttctcgttcggattatgatcgtgttgctcatcttcgaactgctcatgaaatttggaatgctttgagtaactttcatcaagaaacaaataacattaaagaacttcgtcgtgatattttcaaaaaggagtacattaaatttgagatgaaacctggagaagctttggatgactatttttctaggtttaataaaattttgaatgatcttagatctgttggttcttcttatgatactaattatccaaaatctgagatttctcgtcactttttgaatggtcttgatatgtctatttgggagatgaaagctacatctattcaggagtctgttaacatgtctactttgactttggattcactttatacaaaattgaaaacacatgagatgaatgttctttcttgaaaagttgattctaagtcgagtgctttggtttcgtcttcttcttcttcggatgttgatgcttcttcatttaagccttctttacttactgtttttaatgccacatccgatgatcaactcgaacagatcgaggaggaggatttggctttggttgctaacagaattgctcgagctatgaataatgccaggaacaggaaaagaggtggtccaaatcgttgctttgaatgtggttcaattgatcatcttcatttgtattgtcctaagtttgggagaggcaaaagagaagacaaagatggtgagaagaacaacaacaacatgccgaagggttcataccaagggaggaagatggagaatcttaggaaggcttttcaacaagtttgcaccgccttcgagccactaagtgatgtagatggtgaaagtggagatgatgataagggaaagaacatctccgatgtttgcttcatggcgcgtggtgaatctgacacagagtgtgaagataatgaggtaagtgcttttgaggaagctattaatattttgagtgaaaaaaataagaagcgtgagaagatgtatagaaaacaggaatttatcattgaatctcttaaatctgaaattgctagattaaaatctcttattcctaatgatgatgattgtgataattgtgaggttttaatgaatgagatttcaaaaattagagatgttaatgctgcacatgatttgaaaaatagatcttctcttgcttgtagttttgctttgcacacacgcactttggatgagttgtttttaactaaaaagttgttgcaaaaatatcaaattgcttttcatgccagtttgatgtttaacatgatttctgctaaaaagttaaaacaacctcatgattttttggattgctcaacatgtaatttgaataagatgaaactaaaagatgctttaggtcgtgttgagtttatggaagatgttgtgaaaaacaatgaagtgctttcttgccctaaatgtcataaaagcaaaggtgttatggtaaattatgaaaattgtgctaatttggaaaaagaggtttcttatttaaaaaattatttgctaagattttctgatggtaaaaagaacatcaacatgattttggatcaatcaatggttagcacacttaaccgtggttaaggttttaatccttatgctcataattctagacatcctcctgttgtgttaggtgctggtgctagaagtggtgagattttggttaaacctgatactaacaaaactgtgtttaaatctgctggtatcatgtctactatgaatgcatcttcttcaaaatccaatgttgtgcatgcaaaatctcctgttgttgctcatgttgctaaatctactagtgctaccaatgtgtctaatcatcgtgaaaaatatacttgttctttttgtggccaagatggacatattgttggtttttgtttcagattagctcataaacagaaaaaggagcgagagattgcttttgcaaaatcaaagtggcaaaaatctggttttccctcgaagaaaccggtcagaccgcagtgggtcctgcggtcagaccgtcgaccggtcagaccggctgaatagcctcggtcagaccgaccaccggtcagacaggcggtgaagcttcggtcagaccggcccccggtcaaaccgggggcacacctacggtcagaccggcctcggaggaatttttctgaaaattctaaaattgattttgcacatggatatatgtctaatggatcttctagtcgtgtgtctcagtactggattcctaaatttttattatcatctaaccccagtactgaggcttcgacttctgcttgtgtgtaggctttggtggcaaggaaggagaacgtgtggatcgtggattccggttgttcgcgccacatgactggtgataaaaattggttctcctcactcaaaaaggcatttaagactgaatcgattatctttggtgatgcttctacaagtgccgttctcgctacaggtttggttaaggtaaatgaaaattttgaattgaagaatgtagctttggttgaggaattaaagtacaatttgctttcagtttcacaaattgttgatgaaaattttgaggttcactttaagaaaactggaagtaaagtttttgattcttgtggtgattctgtgttgaatatttcttgctatggaagagtgtttaaagctgattttgaaaatcttgtttcacctatgataacatgtttagttgctaagtttgataaagatgagatgttttggcatcgtagacttggacatgttggttttgatcatctcactaggttaagtggtttggctcttgttcgtggtttgactaaacttaagaaagatcttgatttgatttgtacaccatgtcgtcatgctaagatggttgcttcttcacatgctcctattatttctgtgatgacggatgcactaggacagccattacacatggacactattgctccagctagagtgcaatctgttggaggaaagtggtatgtgttggttattgttgacgatttttctcgatattcttgggttttctttatggcaattaaggacgaagcttctcaacactttcgtggtttgtttcttcaattggatcttgaatttcctggttctttgaaaagaattcgaagtgataatggtggtgagtttaaaaatacttcttttgaacaattttgcaacgaaagaggtcttgaacatgaattttcttctcctcgtgttcctcgacaaaatggtgttgttgaaaggaaaaatcatgttttggttgagatggctagaacgatgttggatgaatataaaactcctagaaaattttgggctaaggctattaacgctacttgttatatttcaaatcgagttttcttgaaatctaaacttggaaaaacttcttatgaacttcgatttggacatcaacccaaagtttcacatttgcgtgtttttggttgcaagtgctttgtcttgaaatctggaaatttggagaagtttgaggcacgttctaccgatggattgtttcttggttacccctcacatactcgtggctatcgtgtacttattttggagactaacaaaatcgttgagacttgcgaagtttcttttgatgaggctagtccaagtactagatccgatattgcaggtacattgtcacaggttcagggggaggatggtcgtatttttgaagacgagagcgacaacgacaacgacgacgacgaggtcggctcggccggtcagaccgggcgccaggccggtcagaccggccagggtcgtcggctgagggttccgttgatgctgttcgagatgatcctccggagattacaacttcgaccagtactgatacaaaacgtggatcaacttcagaagtcgctgctcctttgcacattcaacgacgacatccgccggaacaaattattggtaatataggtgagcggactacaaggtctaaggtaacgattcatgatgtttgtgcaaattctgcattttgattcttttgaacccaaagatgtgtcacatgcattaactgatgaatcgtggattaacgccatgtatgaagaacttgaaaattttgagagaaacaaagtttggactttagttgaaccaccttctggacataatattattggaaccaagtgggttttcaaaaataaacaaaatgcggatggtttgattgtgagaaataaagctagacttgttgctcaaggttttactcaagttgagggtttggattttgatgaaacttttgctcctgttgctagaattgaggcaattagacttttgttggcttttgctgcttcaaaaggttttaaattgtatcaaatggatgtgaaaagtgcttttctaaatggttttatataggaggaagtttatgtcaaacaaccaccaggttttgaaaatcctgattttcccaaccatgtttttaaattgtctaaagctttatatggtttgaaacaagctcctagggcatggtatgataggcttaagaactttttgcttgcgaaaggttttacaatgggaaaggttgacaaaacgttttttgttcttaagcatggtgataatcaacttttcgttcagatttatgtggatgatatcatctttcgttgttcgactcacgctttggttgtagattttgctaagactatgcgcagggaatttgagatgagcatgatgggtgagttatcgtactttttgggattgcaaattaagcaaacacctcaaggtacttttgtgcatcaaacgaagtatacgaaggatcttttgagacggttcaagatggagaattgcaagccaatttccacactaattggttctacagctgtgttggatcctgatgaagatggtgaagctattgatcaaaaggagtatagaagtatgattggatcattgttgtatctaactgcttctaggccagacatacaatttgctgtgtgtttgtgtgcacgctttcaagcttctcctcgtgcttcacatcgtcaagcggtcaagcgaataatgaggtatttgaatcatgcacttgagtttggaatttggtattctacttcatcttctatatgcttcagtggatattcaaatgctgattttggaggttgtagaattgataggaaaattactagtggaacatgtcatttccttggtacatcattgattgcatggtcttctaggaaacaatctagtgttgctcaatcacctgctgaatctgaatatgttgctgctgctagctgttgttcacagattctttggcttttatctactttgaaagattatggtcttacttttgagaaagtacctttcttttgtgataatacaagtgctattaacattgctaagaatcctgttcaacactcacgcacaaagcacattgatattcgctttcactttttgagggatcatgttgagaagggagatgttgagttgcagtttttgaacaccaagttgcaaattgctgatattttcactaaacctttggattctaatcgttttgcttttcttcatggtgaattgggcataattcatccttttggcatggtttgagggggagtttgtacctcatagttttatcaagcaataatatgacaatgagaaaaaaattgataaatgagagctttgtttatacatatggtattttcttgtgcatgctagcaatactttgaaggtttatttgtctatagcatagcttgtatatattctagtcttttcatgagatttagattttgcttttaagggagatgatgcatgacacttaaattctatacgtaaattaaaaaaatatgcaatgttgatgctagcatatggtttgatttataaatgctctatatatatgctttattgaactgttattcctcaaatagctttaattgctcattgtgaaaagagaataaaaaatataaaaaaatgaataccgaatccttggaaacagttttgacgacaaggacgtattcgatgtgagcaaaataataggtgccgaatccctagaaacagtcttgacgacagggacatacccggaataaaagagaaaaatatgagaaaaaggctcaagaaaagaaaaagttaaaaaattctcttggttattttgtgctaaagtttatttgagaaagagtgataaatgcaataggtatatgtgtttagtgtttatttttcaacctatgtgcttgttaagatgttgcattataaatcgtataaaatcatgaattttgattgttgattcaaacttaattgtaaaatctttagttcatggttatactttaatgcatgcttgttatattatagatgggtttatcttctttttattgcaacacatgacttgatatgctatatgtgtgctaagctcttcaacattaatgaacataattcttatgcttgatgaaatcattgtcaaaagggggagaagtaatatgaaattttttggatttttggagaagcagagagttgttgagagttgttgagaagagcatgtttttggttcaattgggaatttctttcttttaaaaagggggaaaagttttcttttggattttcgagcacgatgtgtacgtttgtacgaagtgtgctttttaccacttttgtttttatttttccaaacaccaaaacatttttaagggtttgccaaatgtgttcatcaagggggagattgtaaaatcaaaggtgtttttgattattattctgtgatgaataattggcatcggagattattggttttgttatttggaatttattcacgaagtggttttggagatgattggatttacaggtgaatcacaggtttgttagtttatgtgaccggtcagaccgggcagtgtgtgccggtcagaccggcggtgatcgtgcggtcggaccggccagcccgtggtctgaccggccgacactgtgtcggtttcggtttcggatttgtttgttcggatatccgagtttattttatgattatggcttctagatggatactatacatgtgtaatactgttgtttgctcctaatgagtcaagttggcgatagcttgtctcggaatatggtttctttgtttttttcatatgtaggtgactcgatgcctcgggagagtatttgcggtgatggaccgggagtcggcttggggataagacgacgtctgtggtggtcagagatcatgcgggatacttagactagagttgatgcacgtggttgatggagattccatatggcatacgatggaggtattgtgtgcgtatgggatgcggagtcgaatttggaccaaatttggtacaattggttatgtagattttctttcttgtactagagggtttcctaatgtgtttaggactcctagtatttgtttggttcgtggctttaggctgcctagctcatgtataaatagagggggagcgtgaggcttcccggtatcgctttagagagcaattgagttgagttttgagttagggtctcgagtttagtcgaaatttttgtaaggagtgttgttggtgtactttgtaaacacagagagaatcaataaagtcgtcatctactttaagagttcttcgatttgtgtttcaccgggtttcggcggtctaaccggcgatctaccagcggtcagaccggcggcatacggtcggtcagaccggcggaggcagcaggcgcggccgcgacttcgacggttcgaccgatcgatctacttcggtcagaccgacgctcatcaggcagtcagaccggctcaacaccttcggtcagaccgcgatccatcgacttcgaaggtaacttttatttccgctaaaagttttcagtttttgggtatatcaaccattcaccctcctctggttggcttagttcttgtgattcgattctacaccatcatccatttcaatgtatgcttgcatgaagttactgattctgagcacccgaatttgacacattagagcgtacatgacccacatcaggacatatcggaatggacgactatcttcatcagtttcattctcttctcgacttgaattgaataccagaacaaacttacgtagaggagagcttccatggaattgtacccgatggttgaaaaacctgttgaactccttggagctcagctcttccatcgttgcatatcgatgatgagcaggacggacgtggacttccagaggttgcgccagcgcctggataggatgcaggtcatcatggcctcatccgccggcaggtaggacagaatgtgatggacgatctcgtccgggagggcttcgattgcatcctcctcgctggcctcagacattctctttcttttcaagctctttcaccaagcaggcattccgtcgagcgggtggcgggaggcgggcactgcatgcaagaaacgaagggtcggctccagtccgggctcaccaggatcctacgctgattgctttgtgaccgattagcagcacgacgcccacggtagggaggaggccagtcacacgagcgggtgggcgggcgagcggtcaggctcctgcgagtggcctgcgagtgcttcgaattcgcacttcgccgcgccccttaggcggcgcgaagcgaagctagggtcttgtttggttctatgggctaaacattagcccctatcttttagctctgaattagccctcaaggatccaaacaggtgggctaatttttggctaaagtgaattagcccccctcaaaacattagcccctccaaggggtgctaatggggctaattttgtgtgggggccatgctctctctctccttctgtctcctctctttctactctctctccaccttttagccttgaattagcacatggatccaaacataccaccctaggctaatgtttagcctagcaattcatgactaaacattagctctcaaaattagccctgggctaatcttccaaacagggcctaggacgacaaaccttgcgaggctcagtggaggcgcatcgacgctcacgccacacttacggagagcgacgtgcgcggggggcggatatcgtcggaggaggcttctctgctttctctaggctggatggggttgggttacgcaggctggagaaaactgattccagggatccaaacataaatgtatatggaccgaaattccacgcctgttcgaaacaaggctgtccgtgggccgaggggaatatcggtcccccttgggctgaagtactctatgcctggctgtgaaacattataataaatttgggcagagatatgtacatatttatagtattagaatgtgtcacattcaatattatattggtgttttagggacggaagtagtaaatggcaaactccccggtcaaaaacaaaaaaaaaaacttatatatgtatttagactcataggtaggagtagtttttttttttctctgatacaaaggttctatatcggttgacacattttacgggaaattttacgaaattttagtcttcaaatctacttcacttttgtctcttgctagcaagctctgtcgagccctgaactctaacaaaccacgatttagcgttttgaagttgggaggtggtgaaaaagttagggggcaaggcggctttagagggatgaccgtaggcattgatggagctgtgagattggaggagagcattggccaaggttagcaacagatgccttatggtagtggctaggaggtgggagagtcatccaagaaaaggaataaggctggtgggggcacctcaccgctgcttggaagaaggaaaagagggatgagtctaggcgggtgggtgatcttgttggccgttattggtggcttccggcaatggcgagattaaggggcgactccctaaggtggggaggcagtgacagcggcaatcggatgtgagtaaggaagaagagagtaatgggttacaattaaggggtatggcttgatcttaaaagcgatctcaactatctaaaatttatgtgatttaaagagggggaatgtgttaagtgatatatgtgtagtccctttttctctgaccttttgggtatctttttttcgaacgacttatattttctctattaatctatcacttgtttttcaaatattagaacagatcaacatccaacaccttaaatttccttttttttgttagggataaaacaaagagtgttctaacataaaataaaatattatacttttgtgtatagatccttgcgaatataacacaaacaaaataagcattcaaatactccaagttaatcagggaaaaaacaatggaagctagaaagtgatgtgaatatatatcaaagctggtcctttttttttcgttattgagcatgtttagggtgtgtccgcaccatctagttcccatcctgaaccgtgtgcgcggaaaacggatcagtccattagcgtgtgattaattaagtattagttatttttttcataaatggatcaatatgattttttaagcaactttcatatagaaactttttgcaaaaaacacaccgtttgacagttttaaaagcatgcgcgtggaatacgctggagaggggttgaaaagtctgggttccgaagagacccttagttgactaataaataacagaaaattgcatgactaacaaatagcagaactggctaaaatttacttaagctgaatcagtaaacttacttatggccggggaaccagacattccataacattcatggagcctatttttcgtagagaatctattgagcgattcaacaaatatccttgacatcatcacacgccttgaagtacaaaaataaaatctgatgacgcggtcgtcacattggtgctccccaccaataggattcgatgcttgccgaattcggaaacgttttaatctatttctgccgcagcaacatccaggataaatatgcaaacactatgttggcagtacagtactgcaggtagtagtactagttttgccagatatgggcacagaattaattcactagctaggaacatgcaaacatgtgtctgacttgccatgtaactgcttttaagcgagtataatagtgcgctataagtctattataagcttaggaggaggagaaagatactgaaaaattaaaggtgttggctctcaagagctagcttatcacaagctctaagacaaatacattaaatgcataagtgagagataaagagaagagaagaaaaatatagccaaccttataactaatctattatatacgttgattttaagatgagttaatagtaggaagtgagctatactattatccttgctcttatatgtacacgccacacctgtgattaattagtataaagcctaattaatcctactagagagtcttgacacgaaagcatcaacacttcggatttttttttagctcactaaaatggagacgacgatgcaagtggatgagaaaattcagcgtcgctgtcatgaaatcattgagtagtatttggggatgatgatgcaaaggcttcaccaatcaggtctcttaacttaattatcgagttagcacgttaataccggcggtagaagaacagttagcagtttagcgctcgatccggacgacagggcaaagcaatgtcaacggacgcaaattgttctactcaaatacggcaaattcgccgaagtgtagttgccctcttctggattttctgcggccgggtgcttctggcggtcaggctgtgcaacttacctgagtttttagaaagagtgattcaacaaaggctcaagctagactaaagaatactacctgcttttaaaagatgatgccgttaactttttatcacataattaactattcattttatcaaaaaaattctgtaattataatttatcttgttgtgagttattttatcacttaaaatactttaagcatgatttattagaaatttgaatatttttttaataagacgaataatcaaacgtgtttaaagtcaacggtattatctattaaaaaacggagagagtgtattgatgttaaggaggaccttattatcaatttcttagtatcacttataaagagagttgtaagtttgtccctttccttgcatatgattctaaatatctttttatgaaactagtttggtaggacatgttaactgcgttaatttgttccttcaacttaatatatgtgctcttattcatgacaagtctctcataggtgtttaggcccgtttagataatgggaaaggaaaatgatttcccacataccaaggggtaacttcgaattctacccatccatttttctctatgttattttattctaatcctttgttcattttcaatctcaatcccgtcccactattcacattatccaaacgtacccttaggagtggggtgaaaaaggctggttaaaaaaaaaaaacctcagttgaatactatttgctcgatcccaaaaacttagctcacaaaaacattaaactgtgagtctacacggtgcacaataattaatcatgcatgtgcacactaaatccgtgctttctctctctaggtaaggccaagaatatcaatattttttccattatgtcataggtttatattttttggacgggggagtaatactttgtacaaattggatctataaaaattatatatgaagcacatttgatatggtactggagtcatatgtgtgcaactctagcaaacaaaattcagcaacattcagaactaagtggtgtagtggttagaaattaattactttcactgtaacagttcagtggttaagtgcgtgtttggttgcctgcacgacccctggctcacacacgcagggtgcactggagcgatatttgctagcccgccttcaaagcctggctccgcgtatgcaaataagcctccctagctagccaggcctgagagaatgcccgaatcaagcttcgctccttgtccgggctaagcgcgtgcaggtgcggggactagcgggtgcggtggggggacgcgagaggggtggcgcatcctgtcacctccctttgccccatttgcttgcgcggagcctcttgagttgccgtcgtctccactacctcacgagcatcatcattgcctctctgtcattgcaaaccgcgagaggagctccaccgcactgttgcctccatttatccaccatgcctcgatggatctggaggctcgaggggcaccaccgccatcgctattgccttccatcccctcctcctcgtcgcattgtttccctttatcccttcctcgtcatcactcccttctatgatgtcgccctcatccccttccttgccagcaccatccgctctccctctagtggcccaacagccggattcaacagccactgggatggcgatggaggcaagcggcaaggtggatcccggcaggaggcgagggacggtgagcttcacgaacaggaagattcttggattcctgctatcccttctcctccctcccccccccccccctctctctctctctctcacacacacacacactggcccattgtggataaatatgtttggcaaagttattgtatactgtgtatagtgtccacttttttactactatgtgataagaatacatctaattgaattattgtatataatgtgtaaattagatgcttatatgaaccttttaaattctttataattgaatagtactagaattgcaggggtaatcacaccatacaaaacaggaggtaaccaaatttggactcacacagtcaaccaaacaaaatctcttgcatacaacatttgcccatacaaccaactaaacaacatatctcacatcatccaggcctaactgatacaactaaccaaacaacttcatttgcacccatctatgcaggctaggatgactcaggatggaacatactggccaaactaaaatggtgcaagaaaccaaacacaccccaagtagggagtctacatacatcaaaatttctatagacgaacttagacacatgctacttgtcacttaaaccacttgaaaaatacaaaggctagtctttaggacaatttacgatgcaaaatggtcttatggtgtagtttcaaatgagagagtacgccatgtagattgttttttttcacgaatgcgcaaaaggattgcacatcaatatattagacgaaaaaagttttagttacacaacgcaatcaaccagaccggcttatgccaggggaagggagaaaaatcaaaataaaaagctgaagctagagaaactacagtggctaagcactaactccaagcagagggaaggggcctagccacgctacactcccaacaagtccccaaaaacggcaacgccagctaaaaaccatagatgtagattgtagttactatgcaactaaaatgtaataagttacccttgagtacttttgtattttagttcttgactatttttgtgcatgtccttgtaatatttcttattaccaaaatctattgcaacttttacatcacactagagccatagcgaaaaacaaactcacacatatatccttatcccgctagttggcacacttttcacttattcgaatcacctttttctaccttacccctcacacttctctttgtccctcccaaaatcccgataattgtgaagagagacaactcgagacagcatctagagtgacttcccctctcgcgtcactctccccaggggcggctcaggaggcgacgacccggccgcccctctccccccacccccaccccccttctccacctcaccgtcgcccgagtggccgccgacgaagccgcgcggccgcaaggacggcggcggtggggagctcctcgtctcctcgcgctcgggcggcctggggagccgcctggagtggcgaaggcggtgaccgccagatccgtgccgttccggccggatctggcgggatgggctggcggcggggaaggcgtctgcggcggggttgacgacggcggcggggacgggcgacggtggcggtcgaggtgagttgcgccgggtggtgttgtgggtgatggcagcggggatggcgacggcgttagggtggcggtggtggaggccgcggatccggcggtggcgcacccggatccggcggcggcgtggcggccggcggtggccagagcacgcaggcaccccacggctgccactggcgtcctccggcgcccctctaggcgtcggccggcgttggtggagaggaagacgaccggatctagctcccttgctcaaatccggcgcgtcctctggtgggaaaggggtggttggagtccggtcgttgttcaggtggtgtgaatatcgcaggtatcctcggtgtgcaggtgacatttgtaggcttctgtcgtggatgctttggttgatgggtgctccaaggcgaaagtcttgctccgctctcggtgctagcaatgacgacgcccttgggcgtcgttcaccttcttgaaggcgttgctactggagccctcgttcaactccacttcaagagttttctccgggtaaaaacctagattcgttaggatcggacgatgtcgccgttctgtcggcataaccttcttgaaggcttcattttaggagtttatctcttgttggacggctgtacttaggttcagtttgtcaatgtcggggtttttgccggttttcctttaattaactgtgctgttgtaaggtttttgggttcggtttcccttataaactagatcaactctcttcttctatagtgaattgcaggagctccctgcctgtcccctagaaaaaaatcccattaattgtctccttcctacatgttgtgccaagatcgttaattacctcgccttctaacggttgtcgtcacacctatcatgccaagccaccaataaatgaggatatggcatggatgtggtgttgcccattccttattggctctaaccagcctaaggcgtggccgcacactcttccataaccttgaccatggctatcatccaccgcactcccattgtcagctagtttgtgtctataatgactttttgggtggctcaatcgaaatcgatgagtgatgacgataactatgatttggtgaagaaaatattaacgatgtgagtacaactaaaccagacattgcattataccttagcggccaatataccactctaatgttttattgatcatgctagcacatatcaatcttattcttatgtatccaactagcttgtttttgcgcgcacacacacacacatgctgttgtcaagtgcagaggccgccttcatctagatctagcgatgtagtgtcgcccttgtccaatgctttagtcgttgttttctacattactcaactctattttcttctgttttatattgtccaaggcaaaatctagccatggtgcaagcatagtgccttttgcactttatttctctatgggccgcctccatccctcaagttaccatatcttctataaagcttgtaaagggatcgatgattccatagcttctctaatggtgagatttaactttaagggttgaaggaaattaaacgaaacaaattaaagatataagaaaaagactaaacgaacctatttagtatattcacagttgttctatttacttggagcgactcctttttttcctcttccctctaagattcacttttgatagcattttaaatactctcatgaaacatgggttaccacttggaccacataatctcatgaaacatgtgttatcagttggaccacataaaatttgtcatcttctgttcctttttactgacaacacttcccacatccatgcaatcaaagagataaacactatctcttcattttttgcctagtaaatcaatgaagtcatttgtacctacattaaaagctatacccccattgatgacctaacatgtgtacacttccaaaagaagacacatgccacagcaaacgtcccgctttgcagccgctagaaaagggcctgtgacagaagatccaggaggttggtggaatatccctcgcctcacttcatctctccccccctcttcctctcttcctgccttccgctcccttctctctcttccctctcaactcctctctctctctccttcgtcgtctcctcctccccctctgctcctccccctcgtggcgcctccggcttgccgcgcgcgcccgcccgcccgcccgcgcccaccggcgcgagccgagggtacacgaggagttcggcctttccggtttccggttgtgttgtgaggagtggcggcggcggcggcgaggcggcgacgaggcgacgccattgcggggtgtggcgcacaccacacccccctcatcgccgctggaccggtaagctctcggacctgctgggatggagtgggggattagcaaaaaagttaaggaaagataccaatatctcatattcccaggcatctctgcgtgtgattgtgtccgagaagaaagaggaagtcgtcgtgcgtgcgtcccctcggcgtcgactgctggtgagttcgcccgccgcctgcgcagatttcctccaatttgcgttaacccctttgcttgtttctcgtctagacatgggtcttcctcttaatattcgtgttagccttaataatactaataagtttgtttgttccccaaaaagtttggggggtttaattgaaccccctatgccccatgttagatccgcccctgatacggtttgcaaagatgagaagttatgtttcccttatttggaccctattgatgtcattcgtggtgatagtagtactagggtggttgactggttgtggtcctgttgtttctactacaattgtactatatgacaagggatttttgtacatcatgaattgttgtaaatcagcattgacatcattttgattctttttttcagtattgatgcgatggagcagcgtgaggatcataccaaatcatcaggtactttaataccactctataggtgatgaaaattttgctatactctaatccatttaatatttatgatgttgtacagaacctgcattcattccatccaaaaggactcatcagatgagaaacatatgggcatggggaggtccttcttcaactacagtcaacggatcaagtgacgcggtcttgttctccagctcgttgccatcagttctgcaatttggaaaacgtatggaaattttcttttctgttaaactacgatcaattcccatacatgagctcacatcatggtgtctcatgcagtgccaggtaaagaaagggagtacaatgctcaaccaaaggatgatatgtttcccatgatgaagcagccaggcactaatgctagagtggctgaccccatggatgatgtagcacagcatttgattggaaatctgttaccagatgatgaagagctattggctggggtaattgaagattttgatcatgttaaactgagaacccaagttgaggaatcagaagaatatgatgttttccgcaatagtgggggtatggagctggatattgaccctctggaaagcatcacctttggtacagcaaaggctagccttgtcaatggtactggaagtagcactaatcagtacagcatccaaaatggtgctggaacagttactggtgagcatccttatggtgagcacccgtccaggacattgttcgttcggaacattaatagtaatgttgaagactcagaactgcgctcattgtttgaggtatattcgtaagtccatggaggcttaattctgttgcttaatgttctgcatagtattttctggtaaaatattcttgaaatctagttatttaacatactttgtggcttcatatttctcctagtagaaaaaactatcagcactccaccaagacaagatgctatcctatgagctttgattggattctaatatgcacatgcatttcatgtcttcactgttgtccttttctttgggcatgccaacagactgcaagctgttcatgtagagaagcatggttacgctacatgttatgtttacttaacattttcctggttatccctcttatcatatgataataaacaacagtttttattgtattagtaatttaaaactcatttaagtttatccaaacaaactaatacctaaactcatgccttagttcattatcctaaaaagattttattgagcatatttctttgatactactgttattacatgacccaagtaatactgtgttgaaatagaataactcagacgaatacacagctataacttgggtgctgattagtctaaactttcagagatcataacgtggctattggcatgtagcatagatgaacctttattttgttgaatttatattactcaaaacatgtctgaagtcagttgttgtgttatctcacaataaaatgttggttgtgtcaaacaaactagcatgcaaaaacttttcactccacaatactacaaaagcattattagtattattctgttccgtttattgtttgttgcagttaagcttaggggtttcttcttttcttttttttatatacatagaaatgcaggtctttaatagtaacctttagggcatgtttggaaattgggttagggaaatgttatcccaccctccaaatataacttttaatcttagctatccattcatctcacctcatttcatcccaaccttccattcatttccatttctcaatcccaccctttataacccatttatccaaacgcaccgttatagtttagtctaacatagtaacatgtttatatgataaccataggcgctgaaaataccatttaacaaacattccttttataaaatattccatggtaataagatctctctttagtgaattaaggcgctacattattgtataataactgaggattactgtcttaagaatggagaaaacaaaatagaaagtagcaaggtattagggcacttcctctgttctcagttcacattttgttattataaatcatggaaccagtttgtaatagcttgttataatctgtctcaattgaatttgcaatttctcatgtgtagtaaaccttccacttttcatttcattaaggttattataacatgtacgtatattttatagtaattattattgctttgctaagcatacttattttcagccatttggggatattcggtccatgtacactgcaacgaaacacagaggattcgttatgatatcttactacgatatccgtcatgcaagaaatgcaaagactgcattgcaaagtaaaccattaaggaggaggaaacttgacattcactattcaattcccaaggtcaatacttttgtcagctattttaatatatcctattctcaatatcattctctgttgatttatttgatttttcttcacaggagaatccgtcagataaagatatgaaccaaggaaccctggtgatctttaatctggaaccagctgtttcaaatgaggaactccttcaaatttttggtgcatttggtgaagttagggaggtaaaaagtgttactctgtacctcctaactgatccaatcattgtgcaccgtatacttaggaacccatatatccttctagaaagctttgttaaaattaacttcaacagcatgttttacataattttgtgctttacgcctggtgcagataagagagacaccacataagcgacaccatagatttattgagttctatgatgttagggctgcagaatctgccctccgttcattaaacaagagtgacattgctggaaaacgggtaaagttggaacctagccgtcctggtggagctcgccgaaggtctgtattgctgtacatcacatgtcttttgtgttcgctaaataagattgtaccatagctgcttctgtgatttgcttggttgcatgctgtcatagtttttttcgctgagatgttgattttgtgacttatttttgtttgttcagttattgctgaaattctagatgatgttttagtgtgcatttaactttttatttagcattgaaaattactgcatgtgggctggcttaacatatgtactttgaatcccctaactcctgttgtacatagttactcactccattggaatttgttaggttaggcatgttgtacctcagcacagagtttaagaagggacattaaatgaccagattacatggtattagtgtttatgcatgcatgcaccataattcgtagtacagaaagtaatgggtcagggttggaaaatctacggaactttttccatgtctgctgtgtgccttacaattgtcaaactagaagagaaaaaaaatcaaaccatgctgaacaaattttgatggagggagtattctctatggtctgttacttgaatggcctttctgacatcaacatctagaaccgtcggactgagaacttcctgtcacttgtgtcctaaggagctttgttaattttttatttgcacttctgttatgcatcatgttatctagtataatgcatgttccaagttctgtgtcaatttgtctagtgatgtttcaaatgaaaatattcttgattggttgttgagggaaaaaaaatccaattgtggattcctctattatctgtttttgttatgcatttaactttcacttgtttggtattttcctttactgtatacagagtattgcacatattctcatggttgtattcttgttatgcagttttatacagcattttaatcacgaatttgagcaagacgaaacaaagcataattcatttcagattggttcaccttctgccaactctccaccaagtattataatattttatagcccttaatctacatcatttatttccttgttctcctatggttatattattacatttgttttaagtgtttcaatttgttctcaggtttgtggtcccaacttggcagcccaacagatgaaaataaattaaatgcactcaatgaaactgcatttaatgggggaatgagccctttgggcagtaaccatctttctgggttctcttcaggatatcctcccatgaaatcacccgttgggaagagctcctattggaataaccgtgctgacaacatattccatgggtcaccaactttgcacaattcacattcgtttccagaacatcatggtggaattataagtgccagcccgcttgtgtcatccgcagcttcgtcagcctctactgcatctggttttactgcactgactggaacatcatttctctggggtaataacaataacttaagggatcatggccagccttcatctatccaatctcaagctcttagcaactcactttttcccaataaccagccacaacgccagagtaatctgtatcagaatctgcgtggttcctttggggcatccgagcacttctcccagtttaatgttgggtctgccccatctgttttcccttttgagagtaatttcggctatttctctgattccccagacacatcttacatgagacagggaaagtttggcggcacaggccccacacgtgttagtggaagcctcatgacgaactttggtgcctatccccgcattaatgttgcttccatgcaaaacggtaagaaatattagcttttttaatgatgagcactgatttatgagaattcgtttgtttttaaatcctccttttcaataatatttcaggttcagttggttttgaaggtctgcttgaccgtggccgaaatcagacagttggaaactctgggtgtcaggaagatagcagagtgcaatatcaattagatttggagaagatcattgctggtaaagacaccagaacaacgttgatgataaagaacataccaaacaagtatgatattcttgaattaattggcgtaatgctctgttattacagtgtcatgcggtctacttttgttgctcatattttactaaattttaggtatacatcaaatatgcttttggaagtaattgatgaaactcatgaagggacttatgatttcttctacttgcctattgatttcaaggtattttttgtattttctggattatacacttctctgtaatatttttgcctactgctgattgttgagcttcaattctgcagaataaatgcaatgttggctatgccttcattaatatggcatctcctggttatattgtatctttctttaaggttatttcttaagctcaacctctttttaccttgtgtgtggctttctttgtataaggttattcctgtttttatagctaattattgtttcttttacattttagttttcttatgctttgaactctgatttaccttcacacctatcttttgtagcaatgttatatatctattattagctctttgcaaatatccatctttgtatggaaaattgtagtcaataagaagcttttgatcgaagtaaaaattagagaatatgactgaggcagaatttaccacttgatttggactataaggatgtgagctaaattttatagcttttgtattactgctaagaatgctcaatattcgccttgtttttagctaccaccacatggattatcttatagaaattgattacccacttaactttgttgcttacattagattccaagcataagtgtttactttcttgcaggcatttgctggtcggaaatgggaaaaatttaacagtgagaaagtagtctcgttggcatatgctcgaatacaggggaaagccgcacttgtaaatcatttccagaattcaagcttgatgaatgaagacaagcgctgccgccctatgctatttgatcccaagcatactgaaaacaacaatcaggtaaaagagaagtgtttcaatcatttcattttattgttggtagtggcagttagaaatttttaagttagacatatttcctgcataaaacagttttctattccatttccatcatttaatactagggtgtacacaattagtttagtttattccattttttagctcttacttaacccttacgttcataatacataaaataccattttacctcttatatcaaatattgaagtgccttaacaaccgattgtgacagtagttctggagcagttttactagaatggttaatgatgatactgtcattgtaaagaatgatgctgaactaggtaaaggtaaataacattgatccggaaggatcacttgaaatatctgaagctaagtcttagatgagctggatatgaactgaggctgtcaattggatcactccattagatgcacgacaatcattcttaactttcagattaattaggttttatattcacagatttttcaggcacatggatagtttatagccactgaaaaagtacactattactggcttagttttccttttttctgcttctacttggtcagtatactacctagcatttttctataaataatattatagttgtgcatttcacttgagttgttaggattgttttcagcgcagtgaattgaaagctcaatgaaatttgagaaatggaaatttgtttagctatttatgtgttgctgttggtaatgctacagtacacatttcattctatgcacgttctttttattcttaactatttttattaacatgagataatcacttttccatttttgtttctttgctgcttactaacaaggtcttgtttacttccgtgtccatctttgcgcagatcctgttgaacggaatatttatctccatggcccagcaagatgccacacaagaaaggcatgacctccctgaaaacccaagggaagataatttcagttaaaagattcaagtaatcggcctaccgggaggtttttctgaaggaggctaatttatctgcagtagacgctgactgttggattgtgaaatgtacaaaacagagagaacttgatgccgcattttgttggtttgcattgacggtgatgcatggatgcagaaagctcccagatgattaggggagtaaaagtgtttcccttttgtgtatagtcttaatgacagtggaaaggttagatttatgaagaaaaaaggttaggttgaaggcgacaaaaggctttactgtagttgtgaacagaaaggcagaaaagtcctgctttctgtgcagtgctgtagtaattccctcttatcttcctataactctagattttgttaatatgcaagaaaaaaaagggggagggctcatattatgcttatcttttcgcttatacttatcaactaaaatttgaattttcaattttaaatttgaagctgatttggggttttctttatcaaagtttattcttttagattgctaaaaatatacttatataaaagttttattcacaaattactttctgtttgtaaatgtcatttgtcttattccacaaatattctaatggttgtgcgttcacctgcttgtcagacggcatacaaaagcctcgatttgcatggtccagcgagcggcttaacgaggacaacgttttgttcacaagtggaagtgacattcgctgggattttttttaatataatgggtaaaactaaacctctatattaaatgtggatatatgcagcgaaacaatatccacccaactaaccttacaaagtttattattattattttctagagaagggttttttttatctgacatctatatctaattgcatatatagtctttttaaattggaacttagtcaatctgaaattcgctcatacgaagatttgaactctatgaagatttgaactcaaaaccttgtggtgctactcaggtcacagcacaacaaccattagccttaaatacaaccaaagtaaaataaacctagccaaaagaaagaaaacaaagtcaatctcatcctacagttccaacaaagattttagagtgatttatgcaaaccatatctacaatgatcaattgttttctattaatgtttacaaggttacctagaagtatttctccttggtggtctgatgtatacaagttgagatcaaaaggaagcacatggttggcacctccctggaaatcacctccaggaagctcatggttggcaccttcctgtagatcacctccaacctgatcatcctcctgatcagccactgctgcttcttcagccactgcttcattgaggttaggtatagcatgttcacctccatcatctaatgctatatttagatctaaagccatggatgtgtttttgcagagttatgaagggataaagtgggagggaaacttgtgtttttgcagagttatgaagtgataaagtgggagggaaacttctgatttgaaacttgtaggatttgttgtggtggggtgtgctaaatttgtattacatcccgccaatgaagtggcgcttaactcttcattcaaattatttggcaccttggcgccctgtgtctgcctgtgtgtttgagtatggagtactactattttattagtgtgtggcagtagtaatattttatttgtacctaatgactgggtgtactagtactgagggtagtttagtcttttgctctttgtcctaaaactactttgggcttccaggaattccttctttctgggacggagggagtacgtagaaaacgtaccagcagaataacagatcaatcatactattactttaagttatttggctgattgttgaccgatgccgttaaaattaaactagtttaaaacccaatcaaactaaaaatcgaaccaaacaaatccaacttccttttcttctcaaatttcccctccactcttcccattcggccagccatcgcagtccaatagccagccggccagaaatgacatgctcctgcaagaacgcaccaggtgtaaatggcatgctcctgcaataacgcaccaggtgtctaggactccagatatagtcatatattaccaccgtcctaaaatataagaatttttttctatgaatctagacaaacagttatccagatttatagctaaaaatatttatattttgggacgaaaggagtagacagctaacctactagagatctaaactccttcccatccgtatatattttaggacagcaacaccaacaaaaacaggccatcatgaaatccattcagaatagtaataatcattgaataaaaggactaaaggagcctctcgtctccacactgatgatccatcctaatggagaagaaagtgaggatgcgggtggtattggtggtgctggtgcccgtgatgctggcgtcgagcctgcaggaggcctacgccggccggagcaggtcgccgggcaccagcgggctttccaagggcctgagcaggttgccgggcaccagcgggctttctaagggcgtcatgggctgcaacaccctcggcaaatgcgacgccggcgacaaaaccggcctcgccaaggtcttcaacttcaacttcggccacggctgaaaccagccaccggtttggactaatcaggctgactctgacggagaagatttgtaatcagcgaatggttaattaaatgttaactatatcacacttaaaaatagaatttttttgaaatttttcaaaagattttttttatatttttttttcaaaaatcacacctaaaaatcatgtagccaaaagggctcttcagaatgtagccaaaataaatctagatttattatgcatttattaaagtttggcaaaaaaaaataaatgtatgcacatttttggcaactttataaaaaaaatggtatggtttgaaatgacattaatctaaacatcccaaaatatcaaaaatcccaaaatatcaaaagaacgtaaacattgttaatttcgataatggaatttaatttaatctagcctctaaatacgatcacatgataccgttatatttgcggtgaatatttttctgagcttgtgaccagtaaactcttggaaccaaaaactttttgttatttattaccacataacttttgcttgtctctgtttggtcgagtgatacttcttattctctatcggtaacttttttttttccaatccctgtattacaatacaacaaccaaaacacaaaccaaccctccaagcattattagccacagcctcgataccatagcaacgaagcatagtgactcaatacagaaagtaccataagagatacttcctccgttttacaggtcattctagcatttctcacgttcatgagaaatgctagaatgacttacattgtgaaacggagggagtactacttatcttctcctaggcactaaacctctctctgtcgtgtggagcgttgtaatcgatgttagggcctgcagggatgatcccgtagggatttatggacggatggcttccatagtagtgctttcttatgtgctccatgttaaccgtgctgctgatgccaggaatctggtagatgtccttggtgtaattgaacagattggggtattccctgaggagccttttgttgcatttgaagtggacagcataaacctgcaaaaaaattgcttagtctgtataaggggaaaatgacttgttatatgcatattagtacaaatcaatggtttatgtgtgataatgattacaatttttattattagatatgtgatctcatttcaagataaggttgcaaaagtagaatggtagtattagtatagattagcttgaaacatcccaaataaacaataaagtgggaagtgacaattggaatgacaaaggagatcagcaagaagtcgaaaagttctctgttcagaaagcacatatgaggttccccatcacatggatgcagaaatgatgcattgttctgaatcatgaaatgttataatgataaaatatgatggttgcattcttgaaaagcaaagcgtaaagccttctctctgaaaataaatatgatggtcggtacaatgttcctgtgtccggaatttggacatttagagtatttaaaagaatatgattaataacaaacacgagcagcccaagtgaaaagaaaaggtggtgtttagcagataactggcaaactcatgtaaatagtactccaattacggtatcaccacttggaaaaagggaaagttttggttgctgcaagtattatccccaaagagaacatgggagggaagacaggaaaatgttgacacgcactcaagtgaattactgtgtttttcaaaaaaaaaaagtatatggacattatttgactggtgatcacatattgacacaagttaacatcaagtccttgttggattaaaaacaaatcattgttgggttaagatttaagatttactattaattgaaaaaaatgtttatacaaactacaaacggaacacagagtggtcatcaattaacctctaaaaggggtacaatggttttctgttattgtttgacaagtgtccgctaaataattaatgagattaatactaatgtagagcagttctgcaactatagagttgaataaacttcgatagagtatgttcggtatgttggaataagaatctcagtactgatctatgttgcagccctcaagtagtaatagataaaaagaaaacttgcattgactcaatttgcatgtccccgtacaatctttacataaaccaaatgcaaaaatatcctggaatagacctgcatatgaaatgtccccattctttataggcatatccgcatatagccagctctagagactacaaagatgaagcgctatgttcaactttatagttttcagaataaagcagcagatacttttggactcaattaaggggaagtacactctacgcagcatggttcctactgctcttattatcgtccaggatttgagatcatactaattgctaccatcacaagtaagatatacaaaaccgaacaataaaattggtaagacttcagcacagtcaaaactaaatatattgacatagttcaacctacatataatagcatatacaaaactagcatgatgccaaaatatattgtagttcatgataagacactcggatgttttttatcttccatgaagagatccatacctcatcaaatcttataagagttacaaacaagcgaacatcagcctctgtcaactggttgccacatatataacgttgcctgcttagaatttcctcacatttgtccagagcctcatataatctcgtgacagcctatgtggaagaaaaggacatgtcaacaacaggaaccatcctatttgaccaaatccatttcaaagaaaccacaaaccaatttacctcatcatatggcccctgtttcttggcaaagccacatttgtacacgccgttgtttatcgcatcgtataccaactcattgatctcattgacggaggtttgcaaatgagcaggatagagatccaggtcaggattctttgcgatctcgttgaactcagtgttgagcattcggatgatctctgagctctcattgttcaccacagtcttgagctgcttgtcccacagaacctgaaaggcaacacaacaaaatgacaaagatcaatccaattgttcataggaaatgtgaagaggaaattcttgaatccgatccccaggttcagagctcaggcgactcaccggaacagttggtttcccgatgtaatttgggctggcaatctcatatagctccctgatggtcttggctccgttgaaaggatccgggtctgcgccgggctcttcgtctccggtggccggaaaaacccacccaagatggtcgtccgtctccctggtcctctcaaagatgggcttcacagactacacacagaagaagagtcaatgaatttcttcttcttcttcttgttccccatgggatgagaaagcgaaatcgagaatggatggatttgctgcttacggtgaagccgatggcgtggtcgaggcccttgagcttgaggtaggcgaggcagcgtgacgcccaggggcacgcgtaggagacgtagaggtggtacctccccggcacggcggggaaccgggcggagctgtccctggagatagagctccggaaggtggacggcgaccggtcgaaggcgccggcgtcggtgacctcgtcgagcgccgaccgagccatctgcgcccaacacccacagagaccactctccagagcactgatcagatcacggatccatcatccaagaaacatactatcgcgagagctttgccagtgaggagtgaagcgtctaaccttgacggtggtggagttgctgccggtggcggtggagagcgtccgggcggcggcggcggcggagaggcggcaggggaagacaaggggcgacgagtggtggggaagacgagtgagcatccgaccgggagagatcctgggattcgagtatacggaggattagtactactccatattggagcagtaactactagtgaactttgtgcgggaaagcgggcaggtggtcacgggggatggtagttccaaactggtagttgctgttgctgcttgatggatgtggccgggttttatgggcaggtgcggtggcgggtggtgggttgcctggaaggaagttccagtagtgacgtaatggcggcggcagccgagcggcggctttgggatggtgtggttggacgatgacgaagcaacccaacttcaccggagaggagaggggcggcggcggctggggtctggggatggaggctgcgtctgaccagagactggccacgtcaacagatcacctgttagaattagaatcccccttcgtttgacaggttgacttgtccgagaagacacccaattaaaagcatctttctcatccttaaagagatattatggggtgtcataacgtacgagataccaatctaatctaatcattgatttaatgggggtaggatcgtctaatgaaaatgaggtgcccgggctaatgatccgttcctcgccgttgcatctaagcttccccggcgccgccgtatcaagcctgttctcccgccgcggcgccatcgcatcgaccccggcgcggctgccgccgcaacgaggccgccgcggccgccggcgcatcgaggccgccgcgggcgccgccgcattcagcccgccgccctctcatcgaggccgctgtgcctgccgccatcttgagccggctattggctagatgcttattgcttaatggaatataacagtaattaatcgatccaataaccatagtaagcaagagtaacaacgaagtttttttccaccaaaaatcaacaccagtatatttgtaccacgaaagaaataggtgggtgagctattgagcttcgctgaaattaaaggacgggaagtcagctgtgcaactggcagcatcttctagcccagtagcccatgagcgcagctggggggcatcaccgagcttctgaccaccaccgccgagagcttcgccggacccctgatctttgcctcttgagatttcattaagatcctaactgccgctggcaagagcatcaccctgatataagcgccaccgtcgagagcctggctggagctcctagcgccgccttgggcatcgccgatctcctgacggcgccgtgccgcctggggctttgacgatgcaaaaacgagaggcgagagcatcatggaagaggataaacgcgaaagtacatatttactctttcaatttactcctgcacgcggaaggaggagcggtacccccgtgcaaagtagcggtaccgctcatgctcgaccgtttgatcttgctcatcgaacgaccacgatttggtaccggccactatcaaggacagtaaaaatcctccccaattaacgtataacgtataattagggcccttttgaatcgcatgactgagaaaacataggaataggaaaaacgtaggattttgatgggaatgtaagtgtaaaatagaggattacaaaaacgaaggaaaatcacaggaatgaccgtttgattgaaccataggaaaaatgcagaaattgaatgagagagatagacttaaaggaaagttaccaagaggttgaagttcttgataaatttcctccaaaatctgattgtccattccataggaatttcaaaggattggataggattcaatcctttgtttcaaagggcttcttaggaaatttttcaataagattgaaatcctccaaaattcctatgtttttcctccaaatcaaaggacacttgtctgagaggaactattagaaatttacaaaaatgatttgtctgaatttttattgaaacttctatctatgctcttctaaactaccctaatggtgattgtgagtggtaaatctgctaccacctactatttacaatcgtgtgaatcttcaagtagtgaggttggtagacttatatccctttcccaaacccaagccaaaacgtttgttttaaagtgaggtacaaaataagagcaattatgatctgaagattatttttcaatgggttttcattttaattttcgaggctttaaagtgtatggtgtgtgttctcttttttaagttcttttttaacgcacggatatacccctaagtatataaatatatttaaaaaacatatcgttcaacggttagaaaaatgcgtccgtaataatctgctggtactaattgaatccttgtttttgaacgactcgcataaggcggtgcgaagttttattgatagagcaagagaaaaattacaagattacaaccctggaagatcgtagccaggaaaaataaaaaatataccaccacccacacatcagcagcgccaacacaccgaacaggagaagattagcactggaccggccgccgctaaacgtgaccgaccgccgctagaccaacaaagaaatacggccgagatcgtccaaaacccaatccttacaatcaacagagagcctcgctctatccaagtctccaggaattagggagagagggtgagagagaagaatggaactcctctcccctctaggccctctaacctggccaacttgtagagactaggacgccgccacaagaggataaaatcaaaagtgagcttgcaccaattggttggtaggtttcggctaggggatgcctaaacgacgtcaccaaagagaaaaatgacggaagacaccaccgccatcgtccgtcaaggtctcagagaaccgagactgggctttcgtccagcatccacacatgagggatgaaacagcatgacaacgccctcaggaggggaatcacgcttcgagcgtcatcgttgttggcccggctgaggccgggctgagttttcaccatccgctcaccacctgcgagtccacgtctgatgccccgatgctccaccaccgtccaacctctcccgacatgtgggaccactgcaccggcgccccctgccggccagccttcgtgcactgtagaccgcaccgcacccaccagcatctcctcctccgccgccgccggctgcgcctcctcgcgccgtgtcggcctccgctgccaccggccgcgcctctacgcaccaagctggcctccgagcactcctctcgccgctgtcgtgccggccaaatacggtcatcttccacacctccccagctagccgcccgtggccatccgtgccttgccgtcacccatttccagtcgtcaacaccgcgtccacacccacccccgctctcccctttctccgccgcccgacaccttcccagcccccacatgcagccaccaacaaccatcagccaccgtcgccaaccgccgccgcagcgggccgatgtcgcgttcatagccgcgaccaccgccgccgcaaaccgcccggccagatctggccatgcccgccacttgccgccgcagccatggtcgccatcgcggtgctcgccgccgcgacctccttgtcccgccgccaagcgtccatgccgctgccgccaaaccgtgtccacaccgtcgtctccttcgccccgacaccaggcggctgccttgagtccggccccgccgccaactccacgccgccgaggccaccgccgacgccgccatctcaccgacctggttctttgccgcccggaacaacagatccggccatgggggaacaggatccatgcatcctggcgccagatctggacaccgccatcggctcttcctctacgtcggcgcctggccctgagctctgtcttgctggcaccccgaccgccttgaccgcgagcgagggagagagagccccgctgccgccatgcttgtagctgcctggctttgccggtggcggctcgggcagcggcgaggcgggggaggggaggagaggggcggggggcggcgcagcttgtttcgccatcctcgtcgcccccggggcagagcgaccgggcgtgagcttcactaagggtgtgtttagttcacgccagaattagaagtttggttgaaattggaacgatgtgaaggaaaagttgaaagtttgtgtgtgtagaaaagttttgatgtgatggaaaagttgaaagtttgaagaaaaagtttgtaactaaactcggcctaaacagcactggttgaatcctagaatatggctccattgacacttgccatatgaaagcaagtggatcccgtcatgttaaccaaatcttttgtgaggatggtttcaccggagtattagtcctggatttttcacattttggtccttttgaaaaacttatttcgcaagtagatccctagaaaaacttatcccaaaaatggtcctttttggggcgccagagtggctggcgccgtcgttcaacaggacggcgccagcctctttggcgccgtcccaccgccgacgtggcggggcgatgctgaggtggctagggggagtgcgccagagtggctggcgccccccccccccccccgaaattttttatttttgttttatttgtttgatatttttttcacgcttagggacacacaagaaccaaccatagaaaaattgaactcaaatggacgtaatatgtgacatgtagaatttttcctctcctctcctctctccgaactagtgcagaggagagagatgtgcaacttttttatttttattttatttttttgatatttttttcacacttaggaactcacaggaaccaaccacgtaaaaaataaactcaaacggacgaaatatgtggcatgtggaggttttaatatcgccgaacccggcaaagcggggagaatcggatgtaactttttctgtagatgtccgttcatatattatttgcctgattccgagtccgtatgagaaagttacgcctattttgatagatggcatattttgtccgtttcggtagagttttggaaaattctacatgtcacatattttgtccgtttgagtttattttttatacggttggttcctatgttctcctaagtgtgaaaaaaatatcaaaaaaatgaaataaaaataaaaaaattgcatctctatgtactgtttaacttatatatgtcatttcatgtggttatattttgaattagattaagtaatttatatagtggtagagtacattatatttaacatgctgatcaaagggttttactaaagaagttatggtctaatttgagtgaaggtgcaaagtagactaagtggtatgctagatattttcagacttagctaagtggtagttcgagtttaaattttttttgtggttggttgtatcgtgatcctgagtgtgaaaaaacatccgaaaaaataaaataaaaataacaccgttgcaactctatacagagaaacatgaatggaggcggcggcgccagccatgctggcgccctcctccctggggcggcgccagcatggctggcgccctcctcctgccacgtcggttcgcgtgcgccacggtggcaggaggacggcgccagagtggctggcgccgtccgcgccagccactctggcgccccaaaaaggactatttctgggataagttttttcaggggtctatttgcgaaataagttttttaaaaggatcaaaatgtgaaaaatccagagtattagtcatcgtgaatatttttcttggttttcggattttgccagatagaatttgtatttaaaaaaatcctacaattaaaattgattataggctggtaactgattactggtggaaggagctttaaatttaattctcgttctaaaatttatattttgggtttcggtcatagcctcccagccaataatcaacccataaccggtccttgactccagaccaaacaaggtactccctccgttttatattataggtcatttttactttagtcaaagtaaagctgttttaagtttgattaaatttgtagaaaaaagtagttgcattttcataccaagaaaaatatattaaattatagaattaatgaaactaatttagtgttacacatattactatatttgtctataaatttaatcaaatttgaagtaatttgactttaaccgaagtctaaatgacttataatttgaaataaagggaaaactagtgattaccgtggtgttgaattcaaatttgaaagcaatggagaaaaaaaataaaaaagaatcatataattggaactctgtaatgctatttggtgaaaaaaaaactttatgaaatatacaaagtaaccaaatcaatattgaaactaaaaacagaaaaataaaaaatgtgctaagcccatcgagagtaagatgtgactcctaccttatttcaattttcaaaatatagtaaaaggtcatgcaaagttttctgtataattcattttcttttgcattttgcggattccttctacacttctctaaattcaggtatataaaagaaattgaacaaaactcaagggcatagatagatcaggaaaattttcaacgacgtacaaggaattgtctcaatttttaaacatgaattccattcagtttttcacggttaccatgtgatagccgcgttaacgtggagtgccagtaacctcaacccctacccctacatacagtaaggtaaaccctgctccaaactgattaccggcaagttatttgtcgtttcttaaaactgtgatccccgggtttgaattctgaaacatagaaaaatgaaataactcggatcaaatggccaggggaaacagacatcggtgagcagattttagaggatagttctcaatctatggcaagaaaagcgaaataaacaacctttattgtgtcattcaaaaacagctatttcaccagcccagctacatgaagcaatcacattgggaattactgggtggtatgcaacgtcagtacatggttctttaaatgcctgtattttactcaaaagtctcgacgatttataatcgtaaaaatagatacaaccatcggatgaaccagatgtaagttccttcccgctaaatgaaaaattgcactttatcgggaaaccccacactccatgtccttcataccgcatatacttgtttagcttgaatggtgactttgctgaaaagattgcaatgtagttaccgttggattgagcaacaaaagaagcttcaaatgggtgatatcttacacaaggacaggtatatgcttctgtataaacctgccatacagaatgccatttgtgtcaagcttcagtgcattcagtgtttacacttctgtataaaccttttttaatatttgttagttcgaaatattattctctaattcaaagttgtcaatattgaaaagtgctttctaatcaacacgacagcataccttcttgatttcaagtaataaattattagtatgcagagcaaatagcatattagcatgattatcataactgtaagttgacaaattcatcataaacattagcccataaagtattacggagtagtacacatttccataccagtgagacacgcataccaacatatcaggcatctataagaatttggggaacaaaatggaactggttttgttatggaatgaatatgaagcaacatcaagcaaggcaccatggcatattaaaactataaaaaagggtattgaacaaaattcaacatgctccaccttcatatgcacagataaagtcatacttcctcgctagtgtacatcttgaacttctatatttgaagctatagctatcataacagagtaattcaagtgaagcttacatgagcaatcagagacatgcatgattagcaagtaatcaaattgcttactaaattaaggataaatatctcttctgtttttcaaactgctgaagtatgcatacatatgaataagaatgggaaaagatcctcagtgaaaagaagataatttgctatgtacaaatagttatcaatataaattagtaacctattacctggttagataaaggaacttgtcgcagggtatcccatataattatagaattctcactaacattacttctggatgtgtctgttgaacagataaactgtttcccatcagaactgaattcaatgtcaaggatggtgccaagatttctttgatattctttagtcaccaaaccactccgaatatcccatagtctaagagaacccttggacccaccagacaggaacaggttggagttacttggattgaacttgatgacctccacagcctgatcctccttgaacaccttaatttctttcccttcctcaacatcaactaaccgtaaggagcaatcaaatccgccagaaagcaaagagagcccattaagggaccacctcacatccttcacagcagcggtatgaaatttgaaaacacgagcagtagtatttcctttattccatacattaaatacatgaattgtatggtccattccagcagaagcgagaagatgtgctgtaaatgttcttccttgtgagtttttactgacttaatattctaataatttattaaaaatactatgcataatcatattgcgtattccgtatgtaaaggagtcttcatctaaaaaactaggtgataccccgcgctttgttgcgggattcatggataagtatatgttaaatattgtcgaaatgataaaagttgaaatgttgagaaaataatgtgaggaagatgatttgacacatacttgtcgatctctataatataatattgtagatgatgtgtcattcttgcatgggatttaaaataggctaaatagtaattgctagtgagtgaagatgtggcatgcttgcatgggattttaaatgggctagaatagtaattgctagtgggtgatgatgtggcatgcttgcatgttgagatttagcttctaataattgttagtgggtaccaactatatacaaagtgtagatgaagtaatatttcttttgttagcatacacaatttatggagatgaaagttgccttcaactcatcccatggatggtgcatctcttttagatgtaatcattaggagtgaacaccttaatataaaacaacagacatacaaaggaaaaaagtattactatagctatcaccttaagcaacacgaaactaatatttacttctgatatatgtataacacctctaaaaaaatctgtataacaagagtatttgtgtaacaatcagcaatctacacatacacatcattcgagtctaacaaggcaggagggcaagggaagatggagctgacacgaaggctacaccatgcacagaccagcgagacagtagacaatgctagcaccctataaacatctactcctcccactcactacattttgggagagcgcatgaaaaaaagaccaaactatatgaccactaccccagcttaattggaggttctatagcaagcttgacctacatagataattgatcagaagtcccttgggactccagaaaccaggagaccacatcactagagatggatcaccatctgtaggttatggagtgcacaattgttaagatttgtatttgttattagaaaagataataagtacattgtccctatcttctctttgtttactttgtatactttgtccaacagtgaacatcctacaaatataagaaaacaattatccatgaatttacctatctatcatgtggttaactggcagttatgactgagccaaggtttcatctcatctcaaaaaaaatattgattggaaccaagaccatgcatccaaatgatacatatacacgtgcttggaagttatgtgtaatttacaatttcttaaatgtcacttgtgctaaatacctactaagctgcacattatttaaaacattcagaagctgtacaaaatcaaacacgaagagcatgtggggttaacaattaacagtgtcaatgtatataggttttcaaaacattcatatctctccagttaaaaaagcaaacgtttttaagctgtgaaatggtttagtcctctcagaccaacagtattaccaaagagaaaagaaatacaaaagcatcctaactgacacaagagtttgattagtttttgtgcacatctactactttaagaccagatacactattaaaaacatcaacattgaccccagaaagtttgtcaagcaagttggaaagttcatactcatgtttcaaagaagaaaatattggtgttttcttagatatagaaattactttggtggtaaaattatagacattattcaccataaccataccattaactttgcaaaagtcaataccatggcatgaagtgcacatgcattattagtggttatcacttatcacaaaagttatgaaatgtttttatattaaattgtccggacctcaaaagttaaaacatcttattgtcccagaagccagaatgaaagattccaacatttttccaacatattctaatgcagaagtcctagaactgagagatgtcttaagtgtatatttacttttgataaatataagtaaaactgagacgtgaaactgtaaaataataaatactgaccatgactttgtgaccaatctacacaattgactgctttggtgtgacccgtcaaagagactgagagcttcaaaggcatcctcctggttgatccaggttttgtttggcatcgtaaagaatgaaaaatatcagctcgcaaatttgaatcagagatagatccaacaactggaacaaaatgtacagaacacatgagcaagtcatacaaaaacctttcaagggaaaaaaataaattatacgtgtttaacttcttaaagccctaaacccatcatcaatgataatagatcaactgcagtattaagtataaaataggactttggtttatggcagaatttcaattggcatttgcccaaaatgtcaccacaggtatctacattatggtttcaggttaagccttcttagaaatcgagataaacaagatcaactgcatttaagatctcttatattgttttaagtcagtttgccttgagattgatgacacaataatctcctgaaaaactcagttgaacatatggtgaacccctgttaccaatctatgcagctaatcacgcccaatccaaaattggcattcagatgatggacttttactacaacagatcagttcatgggcaagaacacaagaggggtgaaagggtagcttatcgtattgtatcctttgcaatcatgggccaaagatcctcaccaggagaaccaaactgagctgccgccgatggaggaagcggtgacgaggaatccacgggagagctcgacgcggccattagggcccgctcccttttggagacgtacctgccgctagcggtgctagcaggcggcggcgcggcgcgtggcctggccggttgagggatggggtatggaggaggtggtgggaggtatggtggaggctcccaccgcggccgcttcggtggaggtccagcggcggaggcgtagcccgtcgcggcccagcctggagtaggggtggcctcggcgccgtcgtcgtcgtcgtcggaggtggcaccgtaggccgcggagagaagatccatcggcgactagggtttcagtgcgaagacacggcgagcggcccacgcgtgtgtttgggcgcggggaggtggaaggagaggcgcgtgcgcggtgcggagaggggatggcgagggcgaagcgaggcgaaatggaaggaggcgacagggtgggtgggggatatggaggaggagcggatgggggaggggagagccgacgaccgcgatgcgggggaaccggcggtggcgctgtaggcagcagcagcatcttacggcggcggggaagggagaaggcgacggagaggccgagaggggggagattcaaggatgttttgtttttttttactagaaaaatgtttgtaaaattcaacggagttgctagaaatatggtgtcatatgctacagtcgatttttttagccacttatatagtagttgcacctcatttacatcccacttacatatgtaattagtatgtaattttcgaatttacatatatatataattttagtacttacatatgtaattttgagacttacattataaatacactaaaattacatatgtactttaggaacttacaacgtaaatatatgtcgactattttttgataaaaaatatggcgccataaatatagctacacccaaattcaatatgtgaattagcttagatatattttttttaaaaaaaatcatgagctgtaattagagtccgatcatctcaagttagaatgcaatttttttatttagatttcttatacgactccttctgtattttaaaaacgaacgaatttaaaacccaacttaaatacggatatgtatttttaaaagttaacgaacttagaaacgactcatacacgaatgacgtaccaaataccggcaaaaatatttttcaatttttataatagtagagattactagaaaaagatgctcgtgcattgtaacgggtgaaggctattttaatattattattattatacagtttagttatggtaaaattcattgtgaggattcgctttgatatatatttttatagaaaatcatgggctgcaattagaagtccgatcgtttcaagttagcatgtgagtttttttaagagatttcttatacaactccttatatattttcaaaagcaaacgaacttaaaaaccgactcaaatacagacgaaactaactcatacacggatgacgtaccaaagtactggcaaaaacattttcaatttttataatagtagagattactagaaaaagatgctcgtgcattgcaacgggtgaaagctattttaatcttattattgttatacagtttagttatgatgaaattcattgtgaggattcgctttgatatatatttttgttgaaaatcatgggctgcaattagaagtccgatcatttcaagttagcatgcgagttttttttaatagatttcttatacaactcctgtatttccaaaagcaaacgaacttaaaaactgactcaaatacggacgaaactaactcatacatggatgacgtaccaaagtactggcaaaaacatcttcaatttttatattagtagagatttcttatacaactccttctgtgtttccaaaagcaaacgaacttaaaaaccgactcaaatacggacgaaactaactcatacacggatgacgtaccaaagtactggcaaaaacatcttcaatttttataatattagggattactagaaaaagatacccgtgcattgcaacgggtgaaagctattttaatcttattattgttatacagtttagttatggtaaaattcattgtgaggattcactttgatatatatttttgtagaaaatcatgggatacaattagaagtccgatcgtttcaagtagcatgcgagtttttttaacagatttcttatacaactccttctgtatttccaaaagcaaacgaacttaaaaaccgactcaaatacggacgaaactaactcatacacagatgacgtaccaaagtaccggcaaaaacatcttcaatttataatagtagagatttggaaaaagcccaaataccacctaaactttggatgaaagtccatctagaaccctaaactttaaatccggacttctaacccccccccccccgaactttgtaaaatcattcgtattaccccctaaggtggtttttgatggtggttttgcatattttggaagcttaaacgaacaactttaaataattaatataacatatttgcatatcatcggttgtaagtcatcaatttatacttatataatgatactattttattattatgttggtacgtgtttataagtgagatctaataagtggtaaaaagaaagatttaagtggagattttaatatatactagtaatcatgcacgtgcaatgcacgttcttcccatcataacatgtttcgactaaactttacaatttatcagcatgagcccttaaaaatattggtgtttcatcttgagaaataaagtaacacttcaatgtgtaaaaatacccactattatacactggaatccatgtagctaagaaataaatctatttaaacagaagtgacacaagcatcatttctattttcatgcaaacataaatgaacaaacaaccaattcgtgcacataggaatccatgtagaatattaattgagaaaacacactcactcttacaatctaatttgaagagggggtatatattataaatccacactcacattattatcctttcatcacaacaacaccatatagatacacccccaagtgttgcacataattttgttaaaacttgagtgccccgggccatacctagaggaccacctcaacaaatccacgatggatttagccatgcagaatcgatcatccaaaaacaaattcctaatacatgaataaagataggtcacaagttttagctgagaaaaatatcacacatatacaattgtacaaataacaagttatatctgcaatctaccaactgacctgtaaaggcacctcaactctaatgctaacatatttgtttccatttggcagtggaactgatcatctgcacagtcagaagaaaaagaacataacagtagatttgtcaggatcgatggacgtgcaaaaattcaccatataaatgtttaatgggtgaattaacaatgaaaactttgatgtcaagtcacaactctaggatcccacttacataacaaccaagatttttcaagaaatttatttttggttcaatctacagtttctgtttaaccaatcatgaggcaagtatgctaaaattttagtggtttttcctaacaatattgcctataaactatagttacttcattaatcctgaacctatttcgataaaagaaaacctagaaaatccactttgcagtttgcaccacgtcgagcattctcattctcattgaaacaaaataatagatatttttgtgtcagtccaccaatcatatagatcatctcttccaaaacaaatttgtgaactatgggaatctgtccatacatattttagatcattaaagcatctgatagtacgtcacattgtatttctaattctgtaagcaagatatttgcacgcaggatgttttttttagagaaaaggtcgaagaatgaccctgcttatatagaaaacaaatttgtcttgctggggattccagcttacatcaatgtgcatacatcgaccaaaagaggcccctccggcccagagaaacaaccaatttttagacagcagggacaacacaagacccataagtgaagatacagtaggcgcagcgattcaaaaagctttccaaaacacctccacaaagtaacacacagcaaaaaaaaaactataactaacccaccccagttctgatatttcgcagtccagcacagcattccttcagtcttcttgttagcaactccagttcatcagtctccacacctttgaaaagtggttttcactacttgtctttgcactcaggatgttgataaaatacaaattaattagcctcattttattggtaaagggatgattcgagtactattgcaactgcctcctagcatcctttccatgttgttttcctggccctttaactcattttcacttctagaaaattataattggtaccctttatatttagtctaaatcaagactaattacctcatctaaaagaagccaaagcatgtgtaggcaccaattgttcataacttactttccaacttccgtaaatcctaattaaaaaaaaaagtgatcatgatataccggtaatcacatgaccagtagcagacaacgtggtatgttcaatttataaaagagcgtatgctatattatgtgtatttctcacgtatcaacccaacgaattcattgtacactaatctagtaattcaggttcagatgaaagatcaatatattggctattcacttaataaaatagcatcaatgtgaatacctggtataggtacataccaagaaaatgttcaggttccctctgctgttccaatttcttacagatttttctacaaaattaaaagaaactgcagtatttagcaccaaacacagccaatgattatgcattaaggaaaaactacataatttacaaatctaacctgaagtaattaatgtaaatcttcattggtcatgagagcaacatcatatttcaaatagcaaacaccatgttcaaaactattatacagaaatatattggtaattggtgcagcccactaatgttagggtgatttttaaaaaaattacctcagcacaattagaagaaggatcgatgtagactattgcagggtttacgcaaatacatggggtgcttgactgctcgatccagcggttgtggcatggcggttgtgggtaggacaatggcattgatgttgtctcggtagcgaccggggcgcagtacaacggagtacttgaatctgttaaaatagctcttcaatttggtgctaatataaacagactcatcaaaattccccaaatctacctcttgaaatgttgatgctttcccttccttttcaatccatcttcccaattcccaaatccataaatcaggtattacaatttgcaaatcacaaataagtatatgagaagagaaaacaggatcccaagcccagctaacaaatactagccgactgctgcggtcctgtttgctgcttaccagggaggcagctgattgctcctcggtgcccacccacgtgctggcttgctgcccgcacaacgcagctgcattgtgctcctatggcgccgctgccttggcctctggtagtcaagcctcggcccaccaccaccgccaccgcctttcggaatgcatgccacccatgcccgatcaccagcgccgcctccctcaatctcacacgctcacggcggtagtggcggctagggacgaccttggctccggcggggacagcgatggagggcggcggcgactggggacgacctcggctacgacggggggcagcggtggagtgcggtggcggcggtggctacggccgggggcgaccacggctcggtctctagtgggggtagctgtggagtgcggcaacagcggcgatagccaggggagacctcggttctgtctccggcggggcagcgatggagtgcggcggcggaagcacggctagggacgacctaggcttcgacaggagtagtggaggaatgcggcagcaatggggacacgcaaggaggagcgaggagtgcggaggcggagtcttcgcgcaggctaaaatcacggtggatggatagggtgaaatcacggtcgctgtggggagggtgaaatcgccggtgaacggtgcggattagggattaggcgatgcagatgcggatgaatagtagggattgatccgggtgatttggcctgtaggattggagggggacaactcctcctttttatattagtatagatatagatatagcagtatagatgtatagatgtccaatgtgtatgtcacatctaagaatcgaagtcaaagatataaaactccataaaaatctctactaaacatttcaatccacctaggtatcagctaatatttctgaggtatcattccgtcagaacgaggtatcagtcgatacctatcaggtatcaaaaaaaatacctccgagatattattccgtccgaacgggatggtatcccgtagcatttttccttagtaaaagacgttgtaaattaagcggggattagaaacgcgagctgatcggtcggcccactgttctgactgggtctagtttaaaaatagcagtccgacatgcaatgttacccgcactaaaatcccggttaccatagtccatagtacgaattaagcattgaagcaactacctgaccagtggagcccgggccaaatcctcgtccgtccgcccctctcctggcggcgatacatcatgccctcgcggtcgccgccgtcgacgccttcgcgggtgcaggcgctgtacgacctctgcaagcgcaccttcccgcccccgtcctcctcctcctctccaccgcccgaccacgccatccgcgccgtctcctctctcctgggtacaccgcctcccgccgcgcgtccactctcatctcatcgtcctgtctgtctcttgttaattatgttcagaactccacgttgccagcaccaatgcccagttggttactttactccattcgttgcaatatctcttgtacgccgattaatacggtgagaaatgatgtgttttgtgttcagacaccatcactcctgcggatgttggactcggagatgatgatgtcgatgaatcaaacatcctgaaggactcactctcagcagtgacgccgcccttcatgtatctgcatgtctacaactgcgatgccttctctgtaggttcaagttcaacatggatatctcttcctgtagcacttttgcgaccgaaacctctgctaattactcagcaaatggtggtgtttcatgtgtgtcctgtagattggaatcttctgcttaccaacttcagtcaccattcctctccatgatcatccgggaatgactgtgttgaccaaattactgtatggctcgatgcacgttaaatcgtatgattgggtggagcctgctgttctagcaagtaacagtaacagcaagccaggttgttttctgtactctgtttcaatatgtgttttttttattttgtttatctattatcagctattaatatatactaattgtgggcatggatttattagttcccatggagtaatcagtttcttgtctctgagaatatatagaagtgtaaaacatttatacttgcattgttttcaagagtaccaagttagagcatctccaacaacctctccaaatcgaactctccaaacacgcatatagccaactctccatctaatttagctagtcaaactagatactcacttcaacagactctctattaatcctctccgaaataaaatcggacccacgtgtcagcctcacctccctcttcttcctctctctctcccccttcctctctctttacttctttttcccctttcttcccgtcgaggcggccgaagcatggcgcagcggtgaggcggcacggggaggcgggaggcggtgcggggaggctgcaggcgtggggcggcgggaggcggcacggggaggcggaaggcagcgacggcgacaacggtttggggagcagggatggcgatggcggctgcgctgggaggagggaggcagcgggaggcggcgcggggaggcggcaggcgcggggcggcaggagtcggcgtggggaggcggaaggcggcgacggcaatgacggcggcgctgggaggagggaggcggcgcagggaggcggtaggcgcggggcggcgggagtcggcgtagggaggcggaaggcggcgacggagacaacggtttgggggggcggcagggatggcgatggcggcggtgctaggaggcgggaggcgtggggaggcggcgacggcgacaacgatttggggggcgcggcggcggagctcggggcggggatgcgatggcggcggcgctgggaggcgggaggcggcgacggcgacaatggtttgaggggcgcggcggcggagctcggggcggggatggcgatggtggcgacggctcgcgatgacgacctcgacgacgaccccgacgacgacgacggcgccccgacgaccttgcgaggagtacagttgctgcgggccggtttggcgaggcgttttggctggccaaatctagccagccagccagcgattttggcccggttggccagtctattggacctcgtttttgtggttgaatggctaaaatttggcttagagaggctggtagagaggctgttggagatgctcttaatgaacaatttgtgtttctaacacagtagtgttgctactacccaacccggcctattggttgctcagtgttgtttaggctatcttcgtttggggttgggaatccttccactggctcgcaaaaatataacaccggattagcacttgattaatgaagtattactccgtttaatattttttttctaaaagacttgaaaaataaattaatatgattttttaaacttgaaaaataaattaatacaatttttaaatcacttttctatagaaattattttaaaaatacactgtttagtagtttgaaaagcgtgtgcgtgaaaaaagagaaaataaaaattgaaaaatgttgaacatacccttacacatcgttttagattggctttcaagattttttatggattgtaatgcttcttttttttcctcctgatttgtagtgagacttggcgagttacataaggatgatgttatgaatgccccttgtccaaccgctgttttatatcctcaaagtgatgggaacatacactgcattacttcagtgagctcttgtgcttttcttgatgtcgttacccctgacccacagtaccagttcgaatctactgggcatgtttgctcctattttcacgattacccattttctagcttctgtaagtgaaacccctcactgtcatcatgttacatgtttgtcaggtttcgtatttaacttaactccacttctttggtggaggtaaaatactaatcatatctgatattggttcaaaacatatatacaccctccgttccataataagttcacatctagcttctcaggtttatcacaaaataagtttatttcttagtaatcattatatcaaaatttataaaagtagagaataataaatgttttgggaatagataaatagataaatgattgtattgggatttgagaaagtgagggtattttggtctttttggttttgtattgatatgtaaggaatgaacttattttgggacggatggtctattatttagtcactgttctattcaattttttggtgttggaaataacaattaccacgtacattagtacattgtgttcgtttatctaacaaaacttgtatgcagtttgattttatcactaacaacttgtgcttcaactacagcggttggacatgcaaaagtagatgatgtgccagataattgtgtttggcttgagaaagacgaaccagcgaatattaatgggcgcaatggcatgtacgctggtcctactgtacaggtattgctcaacttgtaaaatgaactagagcaagtacaataacggattataagttagctacaaacatatattttttatttgactgaaagctagctacaaacacatttaaagaagaaagaagaaaagtggctacagatttatagacagctgtagcacgagctccaaaatattatgtggtgagccatattaatagtgtaatatataattatataaaactattatatgggtaggctattaaagtgacggtagatgatgtgtcaatttttaaagctagctatttgactatactattaaacttgctctttggctgagttcatttgtgcaagtgcaaaactttctctcgtttttgttgacttttctcaaactattaaatggtgtttttttcgtaaaaaaaatctatagaaaagttgtttgaaaaaaaatcacattaaccgattttccaagtttttcttagttaatacttaattaattgcgtgttaatctgttactcctttttcacgtgcatgcttcccgaagtattttaaaacgttgtgttttctatactcctttaaaagaagataatggttgtggtagcgaatctaccactcaccaattgtgttgtattttttttaccaactactcctttctgtaatttaattttataaaacggtccttctacaaatttttaatagcttatttcatctcttgaatttaagtttaccatgtaaaaatatccacacggaatcaaggatgaacttgttcaaaaaccttacaatttatttgttccaaaaaaatgttagcacgtgcataattcatttttttaaaattacacagtacaacacaaacactcacaatgcacgcacactcaccgctacccctatgagcatcttcgaagactaggccggtaaatccatcctagagattgacgaagtcaccacaggcgtctcgttgtcgaggtgtacgtcgtctaccactgaaagcacaaagccgttaaatccgcctaccactgaaaacacaaagccgttaaatcctgaaaaattcactcccatggagagtcgaacctaggacctatgatgctactgaaactctttcatgtaaccactaggctataggccctttcgcatgcataattcatttttatccatagcaaagctgggtattaactatttttttaaaaaaaatctataggaaaattgctttaaaaattatattaatctattcttcaattttttaaagcaaacacttaattaatcatgcgctagtagattagctcgtttttcgtgaatgagagctaagtaccgaacctgctggtctaacttaacgcagccttgtatgaactttaggcctgtacatccctgtagggtgtacatgcgagtttttaatactttatttttcaaaaaggtatggcttgatttgtgcgtattgaatattgatgttagtttgtacatagcaattgcgaaaaacatacacaatattgtttctgatggtagtaaatctgtgctttctaggaacatctgccgtagttgatttaagtggactgaagcacccatttgtgtccagatgggaccaattcacaggtatagtgcttaaaatgttggagatgcaatatgatcatatttgcaacttgctttgttgaaacaaaggcaaaagctctgcatcattttattgatagagatcatctagtggcgacagtggtgatagtctagctattttgtaaatgtatttttttaagtttatatttttctttctttttgtctgttattcaaagaaaggctggtttaattgccgtggtatcgatatggttggtaattcacgtttggcattctggattgcttttggactcttttttttaaagtagtactccctccgtcccattttaaccgcattcatgagtttccttgtgtccaactttgatcatccgtcttatttgaaaagattttgaaaaaaaataaaaaacattaagttacatataaagtattattaatgttttattatctaatagcaataaaaatactaatcataaaaaaatttcaaataagacggacgatcaaaagttggacattgagacgcttaaaatgagatgaagggaatagtaaaagagcaacgcccatgtaaagtatagtaacaaatatacgcaaggtaagttacaccatattattttggacatgacacaatcctcaagttgctgcattgagtaagggcatgataccagtccaggaaagcacacgcacgcgcgcgcacacaatgccatgttatcaaccctggaaatttttactgtgtattgatgccaaacttatatcttgacagatagcgtcgcaaaaattctatgacacctctttatctgtcttcggatgtactcgagttgaagccagtattacaaatcatacctgtatccggtagtacgaaaaattcaacaaacacgagaatgtcttatgtaaaatcgactctcgacttaatgaataaatagcatataccaaagcatgaaagcagacaacaatgttaactgaaaccaagcttttaccttccaaattgcaagtttagattcgcatagctgacagtttgcaccactttgcttcgcaaaccataacagtgatggctccgggaatttgaagcatacagttacttgtgaacatctaacgtgcacatggaatcatatactagttaaatgcacatctttagaactacatggagactgatcagatatgctctaaatctgtaatttagtgaacttggcaacaaaaaggccactcgtttgtgaagttgcaggatcaaatcgcaatgttttgaagatgctgccacttctgcaaggccaactgtcagctgaatcaatcttttgtagctctgcatgtttgcaaaagaaatcccagaaggtcatcagggcagatctgttgaactttgacaacttcaatgaaccaagacaaactaaataatcttgttataagtaaggttcacttaaccacaccaagaagtgagaacaagtacactactaaagatttcctgactagaagtaccacaatcaatttaatcagtccatttgagaaaaataacaatattcatcttcaaagtaaaaatataagggatatacataatactgaaatgaggaacacggctattctgtacctgctgaagagtgtttgcaaagaaactgttgaaccacattctcattttgtgcaactgtcaagctatttcaacgcaagccatcagtagttaagtaagacacgaaatgcaataggaaaaggtgactacacagctgggaagcgattgaggaggcatcaaatattggaattgcatgtgaagagattactcacctgcaagtactatatactagtgatccaccagttttcaataatttaaaaccattagtgagaaggcgtaactgcacaacggatgaaactcatgaaattgtgcactcacatgctaacgagataagtaattatatctaaaatgtacatagcttgattgggtgccaactgtcaacccttcaagcaagcatcaagactgaaagtagtacctgaagatgaagcaggtcatcagttctttctgcatcaagtacacgacgatctaaggttttccatccccagaactcaaatttttggatgtgctttatggatccatcatgagtacattctgcatcaactaggacctgtgtgcatttgaaacataacaaactaaaaatattatccaagctgtgaaataaactgccaaaggatattcctgctggaaaagtatgttgcataagaagagtgcttcatttctctctcacaaagtaacaacgcaatattaagagaagttcaaagacctgatttgcatctacatgaaactccactactaattgtactactttaaatatttgcacaagctgattctctggtgagcatgcaagttaattttctggtggacacagaagcactgcttaattatagaaaggaaactatcaagagtcaaaatgttacatacacaaagttataaacatgaatactttattggacaagggaatatggtagttctcaataagatgtattgagtgcttgatgactaaacgagacactagatttatgtcatgattgaagcgtgcaacatttggaatggctaggtcttcaaacttttcaagatagcacactaaatcacaagacatttccttcctaaaatgatcaaagtgcacagataaaaaactaaaaatatcattagtttgttttcagtaacactaaaaaaacagcattgtactgaagaaagaaaggacagtattgtttaaggtttctgtggaatactttgtcatagccagatgtctgggcttcatcatcagctgatggacgaatagcatcacatttgcgtaatccaactaatcctgaatgtttgccatagtatatcagttcaggttctgaagttgatgttagatgaggtgaacccgccattcttgcctttttagacttttgtcggtctttccacgatctctttgaagtccattccgacaatgtacttccattgtccttatgacaagttgatcctgtgatagataagcaaccagatgcatctactcaagtgctccatgagcaataagacagaaagcaaggattttactctgtttaaagaggcaaactattaccttctccattacccaagctagagttcacaggtaatatagaaaatgaagtcccatcggcaacaaagagacgacaacgatctccgagagaatacttctgcaacatcgtacgacaggccgcaagacggtgctttgcaacatcaacgccagtcagagaacctctgcctccaagcatatctgcaagcatgcaaagctttgcaccttgcacatgatatgagcacatcattcagaataattccacaactaacaaataatctaacagaaactacagacttatgacaaaacaatcatgcaaaaatggcgttcgagtttgaccatcaccaattttgcaatgtatatgtaatataacaatgctatatcaaacctatttgagaataaagttcaacatatatttcaaacttaaagactgtgtcaatccataaatctggtttggggctgaacagatttggttcaatccaacgatgcagagagagcagttacttccccaaagatcaaccaatcaggaaagataattactcttgtgttttatggagaaaactaggtatttccattactgctgaatacatgtggcgcaaaaaaacaagtctagcaaagggccattgttatacacggtagacatctgccacagataaaatactggtgtgatgtaatatataacaatattgaattaattacctggggcagcacagaggtccagaacatgttctcctggttgaacatcaagtgctaagacagcagctccagaagctgcatcaattccatagatctagccaaatgtatttaaaatgtcttagcaggaagcaatggagcaaataaaagaacacatgataagacatgattgcacagcagctttatcctgtaacagtacaagtagtgttataaggactaaggagtacttgagacaatttctctcttgcacataaaagtaagatgttttaagagttctacctaggataaattatctggcaaacacttcatagaataaaaataaaattgcataaacaccagataacattcagttaatctaggataccattaaccgattatgcaatccaatgcgtttgcgctggcctgtaaaaaaagaacagaatcaaaagtaaattttaatgtcttgtcacctttccttgctgataggccatggagctagcaatctgaacttgaggcggaattgcgtagaaatctggcagccatgaaaccttgttgagatggcacgtcagctcgctctgaatctctggaatatggggctccatgcctggttttagccttggaatcacaaagcaaactcaacgcaatgcaaggcaagtaaactgacaataacaattatgaaagccttccggtgattcatcagagcataagtagctctgaatcaatctcaggctgcctcctcaccttatgtatcgtgggatggtgtcgaccatggaatacatcattgggtccaagccattctcctggaggaactcgagaaacgcgggcggcagcgattcaggggcggacctagcgtcggccatgggggctcagccgaacaccaaaatggataaattcgagatttaaaccgctgcctgctactagaagtttcgcggcgagatttgaaccaaggtgccagccgctcgccgcgcccgctccgtgcgttcccggactcggggagcggcgagattcagcacaggaagctgcggcgcggagggacgccggcgttggttggattcgccgcgacgagcggaggaagcggtcgatccagacctcccacgagacgagaggccggggaggggagccacgcatacgacggcgggactctttgaagatgtgtcggcgagtcgctgctggccggagggcggcgccgatgcgtgactgacaactgatgagaagggccggattggatatctgggttttaggtcgacccatcaggcggacgctactttcaactgcgtcccgagctggacacgctaggcgtgatagcgtccttcttattttcctaattcctttccccctttttggagtacaatatagtactacatattcaattttgacatcacaaatatttcaaaatgtgttatactgttatttttttctacacgacaaatataaacaatagaaatttgcttatataatttaaaaatcatcagtgaacacataaaaactagactaggcacgcgtctctccatcctctttctctactcctccctcatatcctcttcatggttgacctcctatctctttcccccttcatgtcctactccaatccacccccaccgctcacctacgtaccaccctgatcctccccccatcttcgtcatgagttttccatccctttgtatcgtggagatccattcaggatggtcgtcgtcaagactcaagagcttcactaattatactgcctccaaagtcacaaatcgctatgatggtcgaggaagacgctgacaagcgagatgtgttggatttagtctccactctccaagctcaacctcatgtcatacgagatttagattttggaggacctcgccacagtgcggcctccctgggtattgtgcccaaaggcgggggttcgtactagtcaccttgccctagggcactatagtgtcatcggattccatgcgcgtcaatggccttggagtcggatgactcgatttggtggtacttctcgctagcccatcctacagctcgtcggtattatgtgcaagtacgtcatccttgacttgcaactattgaactttgacaacacccacatgtatcaagcctgatacctaaaggtatcacgactgatattcaagcttggtacccataatccaaacttgccgcgccacctagtgtattagagttggtgcctaggcacctggtctgatcggtaccgacaagtaccaggttcagtacagggtatcaaggtaggggaggggggacgcaccgtcgtcgcatgggcggatggcaagccacatgccgctagtgcttcatctcgtcaatgcctccctccctttcttgttgttgctacaatcattggggtaaggagttgagtgagtaatgttgctttacacgtaggagatagaccaagtcggatgtaagagctcgatcattaaagtatcctggtcttgtgacaggatcttgtcccatagttgctctctttatgcccccatttgacttggattaagacaaaaattttacggtgcacgtaaaacaagacaaaccatccacgcatgattatttgagttttaattattacaaacttaaacatatatttatttgatattgtagaatatcttttatatataaagttttcatgtaaaacaaaccatttaacggttttaaaaatatactaatatctgcatcttagggcaacatcaatgtatattatcaacatgggtatcagtgtgggaccaagtgacaggcggtagtaggaggagacccactccacattgcttatttccgtgagacggcaataaggtggggtctacaggataaaaaaaatcaacgctcctcaattccttcatgcaagttccggattgatccccaaatcctctcgctgtttccactggccctgcagtctccactgcatcgctccttccccgccgccacccgatgccacaaaatctgctcctttcccaccacccggcgctgccaacccctccgtccccacctctcgatgtggcaatctgcaccccctccccccaaaatcaatgccgcaaacccctctgcacctccatcaacgccggattcctctcccgccacccaatgccgcaatcccctttattactaccacccgacgccgcatccactccacccccaccatcgacaccgcaaacccttccttctctgcaaccaggcattgctatccccatcatccacgctgctatccatgccgcgcaaatttgcgtcgggtgacgtatgatggcccaacgtttttgcaaaaccctaaaggctctttccacatcttctcttgccgattcttgacgttgggcatataatttatttttagcactctaggtgattagagctaccagcaaggtgtgccatcaatctcgcttcaagttgagcttcgagccgagcttcaggctaagcttccataggatcattaatttcttcaagcttctcactagtgatggactcatcgaaattacttgcttttgcttcaagctgagcttccatagggtcattgatgccttgcttttgcttccattacaacggctagtttccaactgctagattctgaacagccatgtcttgctttttggatgtattccaacagctagattttaaataaccgtgtcttgctttttggatgtattccaacagctagattctaaacaaccatgccttgttttttttaaaaaataatctattccaacaagtatttgataaacatatcttacttttctatctattcaaaccaccatattataaaatgttgtgctaattattatcggtgtatatttttttactggttactgaagaaacgatttgctgctattatctgacaaattagagactacagagcaaaaggttcagacatattatgattgtgggctgaatattatcactttatatgtcttctactggtgaaatattacattcattatttgctgagttcacaatacaacgttacttaccctacaaactgatcataattctaaatattgctagtaagttaaccatagagcatatagtgacacactaagtaataggggtacaaacataggttagggataatttattcttctgcaagttctgtagctagctttttgaggacagctttatgcctattgagttttgcatcactaaaattgacagtatctttttccagcaactttaagtatgtctgataattctccatcctagttttatccttctttgcttcaactaatttggttgtcgctcttgtcgcataaggttgctccaccacgagtcacgagtcacgaccacctctccggtctcccactctccactctccactccactcgctctccgttcaccactccaaacgcgtagcgctagcgccgcccgccgcacgatgagcgcggtgcccgtcgtgtcctccgcgctggccggaccagcggtcgcggtcgcggtcgccaggcccgcttccgggtccgtcactcgcctccgtgcgccggcgccccacggcgtgccggccggctccgtgcccctcgcgtccggacttgccaactgctaccgccgctccgccgccgccgcccggaggcttccgatcccgtctgcagcggggggcggcacaggtgagggactctagggatttctgttttatggaagcattcatacggacttcaggtttcgcatgcatttctagtctccagggcgaattggggttataccgatactggagattagaatgtgtagggcacggatgcagttaaatattctcgtaaggagtttttttacattgtacaatgattcaagctctggatgggcaatgagcctgatcgctcggtcggttttcagtttcgttgatggtcaagaggttacttgatttatggcccctaattatctcatttcgcatgtcatagccagaggactatcagctaatttgaatggaaattgtcagtgttaccaattgctgagaaccccatcacaactttatagtcataatctgcaagcttctaaacccatagactttaggcctacatgcataccttcaattacttgcttgcaatgcaacagttttgcaatgatttcatacacatacttaccatatgaatctgggaattgtagccttagggacctgaacatatgttttgtgctctctttgtttacatcaacttgagctgacgtaatgtcaagttgtcaaaatagaggacacagcattgagtgctttcgcttgaggatattggttacattttaccttattgtatatttaaattgtcatccaccacaactttgggcactgtgtttgtttgtttgtttaaaaatataggcttactgattgtgataacgctaaattgcaaaagtttataaccacaaaaatagaaaagttgatgaatttgcagccaactgattctgggaaaaagtagatgtgattgtatagaagataaagcatatgtatactgcttcattagtcaaataaagaaaggtacaaattgtgggacttagaaatgattattgccgcgagtggattccaaagtactaccacacttcaattttgtttcaatccattagagttctattaccccactttcagctttctgacgccagataatttaataccattcagtgttccccttggcagctgccaaggccacctagcagatttttcctgctatagtggccacctagcctcaccttggcattaaggtgcttggtgctggcctgcctccatggcccatgctgacgccaagcgccaagagtaagattgaaatcatggttgaggaagaactgcaagtttttcattctgtttttgtgtttgtgtgtgcatgcacacagcctactcaactaacattacatatagttcatagaatcttttttccctgacatcaagcttgcctcatgttaccaaaccaaagtaccagttacattctcatgagttcatccatgcaatcaagcatgataaggaccatcatattcttggcaatattcgagtaaccagcagtcctgccttttctcttactgctgataagagttaatctgttggatatgcatttgctatgatgtgaagaatacacagtgatacctgaaatagttattccacagagtgtgcacattagacatatgattcagttgcgctctcaatgaaggaaaataataggtcagaacgtgtgatttttttttgtcaagattgtcatgaagtaatatagcaggcttatatgaaatattactgctgttctattagcagagcatattatcttgtgtttgagacttcagagaagtggcttgtgaaattaataatgttctagcttcctactctctccattcttcagtagatgacattcaagaattttgcacttgaagaaagacatctttacagaagatcaaactgccgttccatttcctactctctagagtaaccagttccctatctaggtatttgagcagatgctcatggaacactagtggattcatgagccggttatgcctgagcacttattatttgttgtgcattatactagtgaataggcagtggtggatccagaaatattttagaacccggacagatattaactacatctaatatttactaaacaaaagctatcttcaatcattagaaaacataaaagtccattggagttttttacgacgagcttgggcggctgcctgggttcgccgggcggtaaatctgccaccggttgcaagggtaaattttaaatagctgtggcattatgaagggatggaagcttctctccaaaagtgaatcacatgcatttaggaacataatgaaagctattgactgtattctagagcagcaggtgtaattccatcagctttctgccattgaaattttgttcaaaagtttgtgtccaataaatgatttctaatatcttaatcataagagaactactcatcacatctttttatactttgcctgtagttggggatgcttttgttatagaagacacaacaaatgtgaaatttcctcgagagatagctgttccgggctacaccgagcctttggttattcttggaacaggtacattttcttgtccgtttccctacgggattaaatcggcttgactatgctacttcgcatccttgctaaaagaaatacctcataggttttgttctgtaacaaatagcatggtattgtcaatccattctttaaccaattgacacaatgagaagaaccatttgaacttttcatcagtcattacatattgctgctgtagttagtactataatggacagttttttggataactgtccaaaatatctgctacagttcgttgaatatgtcttatctacttatatcacataatcatttttcttttaacaactcaactgagctacactagttggctcttgttctaggaatatttttccctgttgaagcatctaatctaactatattagtcctatccaccagtttaggttacatagtttcatgcaaaacatcatgatgtttccaaattatgcaagggttcatagtaatttatgaaagatttcatgaatgaacagttgaccacaggcttggagcagctccatgttacacgtgcatgtctggatggtctaaatactgagtgtatataactcgacattgacaagatggctagaggatttcccatacagtgtccagtaatgctctgagctgaccaaagaaggaagggaggcccatcacatagatgtgctctcctagcaattatatatagcatcaaactaaatattaacctggcaaactagatggatattaaacagttcaatattttatgaacaatagatattattgttggaaaatatgacagcgttcctacccatcattactgcagtctgacaaaatactgcagatcatgctgatactggatagtattgttgtagtacctaggacaacagtacctcagtgaactgtcatgcccagttcaaaaatggtgaagctatggcttatataagtttgaactatgcagtcaatttctttcactttgaacactaatgtaattgtagatattcaaattggccataacttttctgtttgtctaaagtaaaaaggtttgccatatgaaatttacacaattaaactagctctagaaacacttccctgatggcatactttctgtgacattaagagacagaaactactagtcaaagttgtcttttttttcatgagtgcggatttctttggacagttgctgcaggctggccactaagcaaggtaatgaaaggcacacaacagctaggcgcatagcagcagcagaccttctgtttagagaattccttatcctcataataggtttggcttgctagtttactcttacctattagcatacatgttagtctcatgtgttagtggtggctacaataagccaactaactatgttctttggattaagaaagaatgggtccatctagttcctcccaaatgttgaccctttcagtctgaagtatacatgtttcatccctggcagctgatgctgcgccaactatcctcccagtagtgtttaccctgtcatgaactctgctcatgatcccttcttgaagactgcaattgtaaaatatatctatgaaacacaagcaatatgtatttagtgactgctgatcaatcgactgcatgaatgggcctaaaataatcagctgcataaatgaagaaatgtgccagacggaatgttatcgagtgtcactgcatccaaatcttcactgttgagttttttgttgttaaatatcatccagtaggaattttttttgatactctttgtgtgataccatgtctaaatttggtctatattctgacttgaattggtggattcccacatgattagctacagttatgcaagagttaataaactgtttggggaataaccacacatgcccagctaacctatttggctattcaaggcggaatacctagatgttggtatgcgtggacatatccacattggaaaatccgcattgctaactacaccctcttccaatgtggaaaaaaagtaagcttagatgacatagaaagtgttaatctgcattgcatgagtttttttgtatgcatataaattggtaaaagaactgtttaaatttaacctttaagtgtgccatattatatttgtttacagtttgcaatttgaattttagctcacttctaggttacagagagaagttctttctaaaaatatatgctgctgcattctatgttgattgctcaatcggcgttgacactatgcgatggagagaaaaggttggtattgagacctttgatgcttcctcagtttttgactccatttttaaaggtaagtatcaattgccaatgaaaaacgctcacaaaatcataatattagctgatggaagctgtgttgtgcagcaccggttgtgaaatcattgagtataattctcgttagagatgttgatggcaagacgtttgtgaaggctctagatgacattattgctcgtcaaataaaaaaaccaagtgctgaggaagaacagagcctgtcaactttccagaaaacctttctagggcgtagtctgaaacaaggaacaactgtctatctaacttggcttgaaccctcgaaacttctggtgagtcacattcagttttgctttaatatgacattcaaaggttgaaaatacatcattttccatttaaaataaatctgaatttcatgaaaattaactacggcgtccagtacaattatttttttaaaaaaggagtactttctgtgcttgtattccagagaatagatgccatttttcatgcactgacatatctgccaagtgccaactctttaacaagtcaggtgttcttactcatttgtgacaataaggttaatgcctgttaacagaaacccaggcatagggaaagcttgaatgttattattggcaagaaacagtgttatagacttatagttcaataggattaaatgcaagagagtatttagtgtttctatttggtaggccagaatacaatattaatggaagagaaaatatctcttgaatctgaaaaggtatactgatatttatggaaattgtgaaacaatttggtaggccagtgcaaaatattattaggcatcccacaaaaaatttcagtcagtaatgatcttttttgtttttccttcatacctcgtgttaatttgatgcaattgttttctattgagtaaattgcattttgcactgggtagattgttttgagtttcacttaagaagctagcagaactaagcctctctttaaccctgaatagaacttgacctttgttgcacaccccaaataaaattttgtagtatttgactattgttgaaacagtgtaggcatagagagcaacagtttgtacccaactgattgggcttgtgcaaagtgagacttttggataaagcagcgtaaagtgaaactctaataatcaaatgctttgcattcttttaggtgttttgctacagattttcaagattgtggaataggacacctgaatcaagtcagattctaacacctgtatcagtgtcaatataaaaactgaatgataggcagctcatagggtgatagcatcgcagttatctgtgaacataacatactttaatatgatacccttttttacatgaagtatctagcattattgtaggcaccttccaaggatgcaaatcaatacccatttttaccttccttacaatagaacttcaacggaacaagtttgcagaagaagacaaatttacaggactcgaactgatatttctgttgctgtagatctcaattgcaggaaaccaagatccatgtcaagttgatgctgaaatcacatcagccactgttaattatgcgctatacgatggcttcttgggtagttctccagtatcccctactctgagatcttctactgcactactgctggaggctattcttacaaagtgacagaaaccgaaatcatggttcgctaagacaaagcatgcgctgaatcctgatgggtgaacaattctagtttggccatcagctcatcgccgactacaaattttcatcttagagtttatttttaataatttttaatgtttggttatatatatgaatatctaattaaactcaaatacatttctaacatgaacattggtgttatgtatctgcttagcaaagatatttcactaactttattaagcgtattggaattttgtaaaatgatatatatctttatatactagattttcaccggggatgtttcatgcgatctgaagattgttataacaattttcctattttctggtcgccttatattttctcttttcttatttgtcagacgcctgaagttgtaaataacttagtataacttaaacttgtagactgaaacatttttatattgtaagcacaaataaaaggaagagagtgaaacttgtacattggtatttatttcagtttatatttaattgttaggcattacaaaggaagaaatagagtgaaattctatgagagctaatgggctcgatgaatgaaatagtgtgatcctaatcaggttaatttgatgaatttaatgacttggtacatggtttatccgttgaaatcgcatactccctctgttacatattataagtcgctttgcttttttcttaatcaaaattctttagatttgatcaagtttaaataaaaatttagcaacatctagaatgctagattacttttattaacgttgaatatattttcataatatgtttaatttagtttgactagaaataaggtcaaaaacgacttatatgaaacagaggaattattattccgtacaaaacgtatgaagtggataatagatccataattgtaggataatcataatatccagattgagtgaatttcctagagtttctaaacgaatttatttattattttgtgaagatgaaatacacaaaaattagtaaattcacgatactcccaccggttctatagttcttgatgttttagataataacatagtctccaaaatatatctttaattatgttttttttgttataatgcatacaataaataaatacagttttactttttgttatagtactttgtaggataaatttaaatatgttgttcttgtgtttttaaactaattattttaattatttctaatcaaagttataaagatttgaactcaaacttgtccaaaacattaatctctccgtcttataatatagcaacctagtaatggatgaaactatccagaatcgtagtattacgatctgtcccatccattacgatttgtcccatccattactaggtaggttgctggaacgggggaagtaagaattatggaatagaaaggaatacataattatgcaatttgatgccccgtgagagtttttttttaagaaattcttgtgaaaaacttttccttacaaacttttgtcgcagtagttttcattttatttttttctgagatattccagctaatcgcagtaatatttgccatattggtttcccaagtgccaaccctctgcgcgcgccaggtgccaaaacccaaaacgcatgcgccccatactgcgcccaccctctgggctgccaccgcatgcgccaactcctcaaactgccgctgctttgtgcatatttatacccaaggcaatggaccacgtcaccgcactctctcagcacccattcacacactcgccgcgccaccactgcccgttcccgttcctttgtcggctccggcgattccaccccttccccgccgcgcacacctctctatcccatccatggcttccaggaacaacaactactaccaccaaggccccaacgtcctgtgggagggctccgcgcctaggggcggagctacaacgaaatggaggagggtgcctcttgcttaatttactttacttttgatcaagtttaagttgatgcgtgtttgtattaaggagggtgcatacatggtgaaaatcagtgagttatattaaaaaaaatttcttgaccaggttcctgagcaccctcttccataccctaccttcgcccctgtccgcgccactgctgccaccggtggacgtcccaatctctacttggaacaacgacgcgtcccctattgttgctgccccgccggtgcctgttctgccgccacatgcggcgatctagccagtggtggaagatgatgtgttcgcctctggcaaagtggttatcactaaagacgatatccacgccatggttcaggaattgacgcagatggaggatgatcagtgcgctgctgccactgagagcaagtttaatagtatagtcaactaccagctccaattcatatatagctaatctaatagctcatttatataatagttatatactacaccacatctaatataaacataatgcattagagtccgtgctgcagctggctataaatttatagtccgctttacttctctatcttcccttttcttctctatatgtgcttgcagctgacttatagtttgttatcgtagtcactctaatctgaataacgccgccgccgacttcgtcccgcacagcaaccgagatgctctagacttcttcctgtccaactccggcttcgttccgtacaatccagcagaactcgattgcaggggctgcacggttctgagagagattcaacaccggaatggtacgtatctaacattcaataattcccatttcgttcacagatttgtattgtatggccccgttattttctcacgaatataaagatgttacatcggtttccgttagcacgctttttaaactataaaatgacgtattttatacggaaactttctacatgagagagttgttttaaaatatcaaatatatccatttttcaagtttataataattaaaactcaatttatcacgcgctaatagcttacttgttttacgtgcccgcttttaatcttcatctccatcttcaaaatatcaaatatgtacgtaatcagatcatatgtactagcatattaagtttcctccaaaatataagaacctagaactcggatatgccattttctaataatacgaatctggacatacagattcgtatatagtactaaaatattttatttggatcctcattttttatattttagtatggaggtagtagttaattaatcaagctgtgtgtacgcagttgaagatagcgggtgcacatgaaccctctaaattcataatttctcacttgaaaacactaaaatgtacagtattgtattgaaattttctagattttcaatagcagtgtaccccttattttgatgctagcttcgctcctgtgtgtacttattcatatatgcagatgttatctacttatacttcaggcttcatagccacgcgctcgctacgattacacgcgttcatgaacaaggacaggctccagtaacgcaacttctatacatggtgtaattactgcctgatcattcactggcaacacacaataattaattcttggttatgtgtagtgcatgtgttatgtgtacgtgcctagtgttatctcgttaattgattatatatatgtatactcgctccacatattttaatatatgatgtcgttgattttttcaccaacgtttgattattcgtcttatttaaaaaataactattatttattttattgtaacttgatttagcatcaaatgttttattttaactaattaaaatattagtaattttccggtcgttacaaatatttttttgtccgtctacttgtgatcgcgcacgcaatgagctgcaggtggcccaaaatacgaaaaatacaaaatatgggctttctcagctcactcctcatgcacatgaaaaatcccaggccgcaagctcagcacgagtcatctcatccttcctcctcctgcaatccggcggctttgatgttccatcccgtagatcccacttgaatgatttgatatttggcaatcacgtttgtgcaatagatatatcttgcctggtctgttaacccttgatttatggtgaaagatttccgatccgttcggtgttatgctccagggtttgtattttcgactttggccaaaatttcattgatttcagtaggaccaaatttacgaatttcagccggatctgcacacggatagccgctggcgttgtcggtgccgcccgatctaccgtaggaagccgccgctgccgtcgtcgctgttggattagccgcgggaagccgttgcctctagcggcgaatcagcccacagggtggatttgcacgcgggtaaccaccggatctgctgcgggaagctaccgccgccgccgctgtatcggcccctgagaagctgccaccaccgttggtgctgccgcatttgcccgcggaagccaccgccgccgttgtcatcgccggatccgcatgcaggaagttgccgacactgctggatcttgaggatggagatggcgccacgatcgctatcgctgctcgcggtgagggagggtgccgtcgctgctgcttgctgtgagagagggcgtcgccgccgccgcctgcggtgagggaggcactgttcgctcgccgacgctgatgagagagagagagagacgaggcgagtggagtggataaggacacccactccacccctctctctccttatccgctcgcgaattaagtcgagcagttcggctcggtttttaggagtgctggttttttaaaaaagatacctataatatattataggtggtagttttttaatgaactgatacctataccaaattaaaggtgttgattatttaaaaaaccgacagctatagtattggtgtcggtgacatatattactttgtaaatgagccggtttttaccgttagtgccccgtgggcgctcgtgtgaggtccttgtgtccacacatgttccttgcgtcgattttttttccactacttgtctctgatcggttcaagtacacgtttagctccatcgattatactctagccaaggagctaagataaaattaggctacaagaccactgacgttgtatatacttgtgtacgtgctattgagcgataagaaatcatttgcttgaataatgttcaaatcatgaatataaaatcctaattacccaaagtttaacttaattaaatatttccggttgcaacgcatggatttttctagaatatatagagactagaaaaaatacccgtgcgttgcaacaggtgaagtctatttaatcttattattattatatggtttagttaagatgaaattcactatgagagttcgattggatatatatatttttagaaaatcatgagttatagttaggagtccggtcatctcaagttagcatgcgagttttttaaaacagatttcttatatgattcattctgtattaccaaaagtgaacgatcttaaaaaccgactcaaatacggatatgtatttccaaaagcaaatgagcttgaaaaccgactcatacacggatgacgtaccaaaataccggcaaaaatatcttcaatttttataatagtagagatttggccactcattcagaaatttatgcagctaacacgtggcaatcggaaaagaaaacagcaatatcttctctcaggtccaccaagaaaaaccatgatatttataagcacactacttgggagttgggaatacttacgtttcatgcaagaaaggcacatgaatttgcatcaccccggcggcagtggaacaccgacgacgcacacaacttaatttctcacaagcggataaatttagtccaagcaggaagtaatccgtccgaaatcaaaccccacatttattctttggcgccgcttgggatatatactccgatgcaaggaagaaaaaatagagagaacaagaaagcccgaatggctaaaactacctttcctttgccacctgttgcgttttttggttgcttgcaacgtaacgaaaacccaatacaaattaaccaaacactatgcgtatgcatagccctcgcaatctccctgcaaatttccttgtcctaagcgtacgtgccagaaaccgtgaactgctccaatccaatgggacattgcatatccatgctgcgaaagatgacaagaaggcggcagccggagccgacgcgcggcacgccgaagccgccgctctttgtcgtcagaggcgaccgccggccgccgctgcggtcgaagccggaggcgctaccgttccaggcgcagagctttggccagttacagttcgcccagaaacctgctgcaggcagagcagacagcagcagatcaggacatgagacgaagttcaggcacgaagttgatccaggagtgctggacaggaggcgctgcgcaccgaagctcgtcaggctgccgtgccggagcacctgcagcacttcggcggtggagcccgtcacggcggaggagaggcccctggccccgtcggcgacaaaggcgccgccgcaggaggggagcaggacgccgatggtggcgccgccgatgacgccgatgaggccggtgtggcagcggaggatactgatggggatgcggtgcgagctgccgcggttcagcggcctcatcctgtacgacgagcatggccgcccaatccgtggcaccacgcctggcagaagctacccccaggtcagtaggcgtacttcgtactatgtcgctaccgaagcaaatggctaacttattttcctctagttctaagtctctggcatataggcatattaaaaaaaaggtgaatattagaaaacgacttaatattaaataaatagaaagatttcgaactcaaaccaggtagcccaccaccttgtatagctaaccagaataccttgtgtgtttcttgtatgtgggcctatttggtaaagggttctcgtatcggtgactcacgttataggaaaataagagaacctcgattattcctctttactactgtagtacttactgttgttgcacatagatatatcatagattcagagctcaggtgagcatgttgagatttgaatctgtttttcttttcagtggaaaaagaggaatgccaaggctgctacaacactcagggacctcctatagacgcaaaacgcatgccaaaaggtcgcaatctcacaacaaagaccggaagaaatgctttgaacatatttcccatgtatgtacagtagcagtcgtgaaagtttgaagctgcaagtttgaataatcgatgttattgctgttaacttaagaaacacaggaatataactactcaggattgtacattctatttctattagcaagtgagatgtacagaggattaccagggcatatggaatagggcacagacgttccgctacatacatataccacaacagctatatactaatgattatccatggtttggccatcccctgttccacaacagctatatgttccgctacatacatataccacaacagctatatactaatgattatccatggtttggccatcccctgttccacaacagctatatatgtactattgcgaatcatgaagtgcaataatctaatgttcggcttaaaaatgccccggcctagctatcattttttttacgcaaaaagtgtactttcaacctgaccgatggatccaaagaggtctaaccagggtttccattttcaatgaaatccccgaagctttaaggtttcgaagcggacaaaagaagatttcgagtgaaattttgaatgggtttgagaaattcaaatttgaaacagtaaaatttaactagaatttagtaaaaattgttgaaaaatatcataccgctaggaattgggatctggcactcggtcagaaatgtaaaccctagtaaccacccctgcaaaaaaaaaggaaatgtaaaccctaggacaggattcacaagccagatgattggtccactgatctactctgttttatgttcacagcttccagaatgactagtcactagagccacacattcacactaaaatgtgtaaccaagtatttatattggtaatactatatccgtatcaaaatataacaacttagaaccgaattagacacgttactatctatattcgaagtactaaggtgtgtctaattcggtcctgaattactaaattaaataacaccataatcattgtttagtgttgaatgttgattttgtttataatgaaaatgattacatctcctgtttttatcataaggcacaaccataagtatattcaataaataaaaaagagaggtgatagaacaattccctaaccctctcttattattagcttagcattaaaccacattgaatattgatttggcatttgattattgtggcatcataatcaccagtaatcatcaaaataatcattgtttgttgacatggaaaaaataaactacaatggatgggcagaagaaggcctctcctagcgaaaaggcttttgcacgaacgttctcgtacgggttcggcccatgtgaaccgactacttttcaattttggaataagttcactttggaccccactatttgttgcccagtccgatttttatcccttggtcgcaaaaccgggtacgacaaggtattgtccgatgtggctcgttgactgcggtctcccttgttaattgtggcatggtcattggagggcaataaatgggggctaaaaaatggcacggcatagcacagctacttctctccttacccgaaaactctagatcgagagctggtgacgggatgacaatttggttgcggcggcgggctcagcggtggtgcggggaagggcgcgatggagggtgcgtcggagggcgctgtggagggctcggtggtgggcaggacagaggtgccggcagaggactcggtggcgcataagctcaccgcggtgagcgcatgataggtatttttctttcggcattggtgcgtatagttttgggatccctgaatcaggtttttaagtatggtagaggtgtttgttgtgttggattcgatgtacattaggatttgtttagttagtgaggtgctggatctatgcaattcggggctattttattccttcgacttaagaaaagatgtgatttgactttgtttgcatgtgtaggacagctaaaagtgcagtttaaatctttttttatttgattatgcatgtaggctagtgctattgaagccatggacgtgttagatactcttgtggtcaggttccatatcaagggtgaatttgtgatagaagttagggagaagaaatatgtacgtagtgtggaggcactgtcatatatagctagagataaggtgccattcggtgagatattagcacatttgcgtgagtactacaaggtgatggaaggaacgtttctgcactagctttttccatggaagaatatgcagactgggttgtgtgctttaatggatgatagagtctgtaatttcatgtctggctgcattgttgaggatggggtggcataaatttttgttgaggagccaaaaatagttgaattatgtgataattcatatgatgacagtgactatgaagctgatatggaagtggatagtgaagaggagtgtgaagaaatggctgcggatgtagaggctgaacaagcaaagggtaaagagcaagaagctatacagaatgatgctggtgggttgaagggtaaaagtgtgatggaatgtgctcaagatgaaaggatgtttgttgtatatgagcctgagtctacacccctagcaagcttgccaccctcagagagtgaatctgacaatgactacatcctaggggatgacaacccatctgatgatgatgaataggctgttgagattgaaaagcattacaaagaggtgaagaaggttaagacagtgcagttagagagcctagatgatgtgttatttgaggaacagaggtacaagccaactatgcaagcaagtgaagatgatgggaatgaaaccccatatggtggcggtgaagatgagcagtctgttgaagaacttggcagtgatggggaggtaaggataaggcaggacaagcaaccaagatacaagaagaaggatggggtacatacatttgagcatgccatgaagttcaattgcaagaagcagttcaagaaagcaatcaccaaatatgctctagttgagaagaatgccatagattttgtaaaagatgatcagaaaagggtgagggccaagtgtgactggtctagttgttcatggatttgattactctccaagaactcaagatctgatagttggcagattgtgacatataacagcttgcatgcctgcccaccaaggagggataacaaaatggttatagccaacaggattgctaagaaatattggaagttaatagctaccaaccctttttggaatttgtcacacatgaaatccacagtgcaggaataaatgtttgttgaggcatccatttctaagataaagagagctaagtcaatagtcatgaagaaacagatggatgcccccaagggcagtaccaaaagttgaataactaccaattggaattgttgagaagtaaccctaggagcacaatggtgatcaacagggagattggactgacccaccagtgttcaaaaggatatatatatgtttggatggctgcaagaaaggattcttagcaagctgtaggaaagtgattggccttgatggttgttttttcaaaggtgctaccaattaatggagagttgctttgtgctatagggagagatggaaacaatcaaatgtacccaattgcatgggttgttgcagccaaagataacaatgaagagtgggattggtttatagacttgttatgtggtgacctgcaagttggtactggacaaggtcgggtgtttattctgatcaacaaaaggtattagtagatttcaagttctcttctctctatggttctttgatgatgtcttttgttatgctaacaaatgtgttgtattgaagggaattctcaatatctatgcaaattggaagagacatttcctagacaagtagttccagaagaagttctgtacatgtgcaaaggccccatggaggatgctgtttaatctagctagagccaagctagctcaggttacacaggctggagctgaagccatcctggttcaggttaggttccaattgtgacttagtcgataacaatatatgtgaatctttcaacaaatggatattagaagctagattctttcctataatcacaatgctggagactattagaaggaaagtcatggttaggatagatgagcagaagaaaaagctagctagattcacttttataggccctggcattctgaaaaagttgaatgtgtacattactgagtcggttttttgtcatgcaatttgcaatggggatgacaaatttgaggttaaacaccattaaaataggttcacagtgcagcatgacaagagagagtgttcatgcaaatattggcagttggcaaggttgccatgccctcacgcaattgcaagcatctagtgcaaaaccaacacatttctcttttggatcaacccatctccttctttccttttctgatctagacacgtgatttttctttttcacatgttttgatctagacacgtggtagactgggctttttttattttgaactgggctatgaaggttgattataagttgtggcttgctagctgtggacagaccatatgggcctcatgtcctaactgggcattttattcttttttcttaacttgtgcattttttaaatttgtatctaattcatttttagaaaatttagtaccaaaaagtttgcatgtacaaagtttatatctataatattttctatacataaagtttctatgtatatatgtataaagtttgtatgtacaatgtataaaattgatatgtacattcaaacaaactttgtggtctttcttgtatgacacttcaggaacatggcagtgttgctgggcaccatgaaaacctgttaattagttgttggacgttgtagctattattttattttattatatctagtgcaaatggagagggaaacattcagtaaagacaattttgttcatggggcaagctacttttaacctgattgggtttgattcaaacatctgatagcgctaggagagagggtaccgaggaaggaagagtggtctagatctggtttgaaccagatctagtcgtctcacaagcacttggctctaggggtacatttgtcctttccacattgtgtctttctctatttgtattgggcataataaaataatgactctgctatctagcagctaattacctggtcttcgtggtgcccaacatcattccgctgtccagcaacaaattaccaggtcttcattgtgcccaacaacattgttacattttgtggtgacctagagcaaattttgtgttgtatagcaaattttgccaacttttttctaggcccaaaaacaatactcgttaaaccaaaatcaggtaggctgagaatagctttgaaagtgagagtggactatttgcacatgggctttcatgatagaaagacccagtaagttacattattgggaaatttacaaaaaaccatcccataagtcacttgaagtctgacatttcatcccataagtcatttttgttgcaaatgcccacccatctatggtgaggacatcactataatgtatacgcacacaacacctgcattgtcaccttatcaggtaaatttggtcatgtgttttgttagtcacgtttactagaatagaatgttacctaaagacgaatatacatgtttctatgagctcagatattgtagaatagcatggtactatataagggatgataccacattaatttgggctcaattaaagcaagagatcaactccaacatgttttggaaacagattcggcctctagcaattaacccggagttaaacggctatcctgtcctcatttagaatctgactaaggtgtttaaatacttgaggaaaagctattccaatgatctttccaaccgatttggccccacctcaaaattccttcggagctatccataatcatcaaaacaaatcaaaccagttttcttatccgagccaaagtgggcgacgggcttttgtaactgacttgtaatcttttatgggctcccactccacgacctcacccctttatgtagcccaggtcatcacttttaggtttggttttgttttttgtttatattatgattttgctctatagctacatccgggtattggtcatgatcgattagattgctgtttgtatctttagaacctctatgatattagttcaccactttattagcaaatacaagtttgcttcttcatatttgtgtggatttacctatctagcaatctgtgttgctttaatctatttcttgctgcgttctttgtttgcgttgcaggaaatgttcttcgtgaataggtgttggtatttcttaacgacattactagaaatataattctcagcaatgacgcataaatacttctggtatattatggttatagagttcatccgcaagcgcacggatataccattgtagcatttcacccaagagtattccaagggtatcgtatttattttatcccgtgggaagatcatatagagagaactgaactaataatttatatattacttgtgataattatattctaagcaggggttaatataatccaagggtagagtgacacacaagcattactactcatcctcataataattaatctaagctaggtgaaagaaaagagaaagataatctattcctatacttctaatatacatagtatacatacattctagttaactgttatactagctaataccctctatccgatgccctcatggtacttcgagaagccacccttgactgccgagttccttatgacagcccgtcgtgaccatccaaccggggctaaatacggaggaataccctccccaggaaattaacttaggattatatataggcgcggaggaatacccgtactgagctgtcaccatcagcggcctacctctcatccgcaatatataaccccaaataatgatatcccgtaatctagacaccatgtctaaactaccagatactactctaatatcatcgtcatgacatagagtaattgcataagcaaacactatactcgcaccaaagcatctcccagataagctagcagtatattcagtataacatgaacataatgtaaagtaggtactcatatactcggaaagtattccaataccagaaatgtatttagaagagtactctaataaaagtacaaggcttataaaagaggaaaggaaagctactagagccatacccgaactcttccgaaggcttccagacttctgattcctattctaattctatttcactagctagatactactaaactaaatttgagaggaatgagagagctcttgcttgaggtgtgtgagtgaagtgagaatggcaactccttttctagcctccgaatgacggttgtggcagttggaatggtcggaaatgccctccaaccgtcattgggggctaatccacaccatctaggcgaagccctggatcggatggcgctaagaagggttcggccgaaccccctggttcggccgaacctggggccgacccgatccagcctaatttcggctggcggcctcctctgtttcttctcttcgcagacttgtgaattttggcccagtttgtcatgtcaattctgagtccttggcccattcatacataagtctggtcctcgacatcgtctgattgatttatcgttggtgttgatgtcgattctcctccactttatgattattctatgcaaaagattagtagacctaatactagtggaatattattattctaacatatttatgcattgcaagcatcactagttctctcatgttttggtaatattgacggtcaaaactgatcgataacgaccgtcaacaataggttaactggacgtgccatggttgataacaaggttgtggtgtagcgattgcaggtgctgacctcgggtttatagccaaatccccaacgtcaatccctacctcaaaatgatagttatccctcactaaaagatcgatccaatcaaagtcacaccctgtggcatattcccttttttttaattaaaaaaaacaccttggtgtgcacgtacttaactgaattaacatattttcacatattactagctaaatagtcgtgctttgtgtaactttatatccccgtttaagaacttgaataggattttggtttaatttatttacagaatatggattggtcgaagaaatttcggatctagctaagttttactccgtgattttatacaacttttttcttgtatagataatttactaacaattttcatttacaagattcattttgtcttttttaactgaaatttgttttgtccttttatcttatagaattgtaaataaaaatatgaactgaacaactatagaatatatagaatacagagcactaacatcacaagaaatgttccactgctagagtgggagaaccatctccctttttctttggaactctaatgaatacattactcgattatccagtataggggtgattatgcgaatgcttttacttatcaaagcatttaatatattttgataggggtggaaacgcaaaattgataggaatgcgtgattgagaacattgcagccatttatcctttctaaggtcatttttttccatctcctctctccacgctccctgcaagcaccattgtgtctttccattaaaaggatcctctgatttattatatagtttagccactgacatgtaaaccatagcatacatgtcagtgatttaattgtatgcgcagttaagtcagaggatatgctttcatatttctatttaaatatttttttcttcactcgtcagtttggtaccgagtgtgccgactcaagccactttgtccttgctggtaggtgagctaatgcatccacggagagcaatttcctcctcacatttctatctgtgatgttctccttctgtcttttcatcagcagcttgcgtttcactgctagcaagaggcagtgaatgctcggggttagaggaaaggttctccttaagctaccaaatctagggacgtgtgggatgggaaagtgcggtggaagaggcaacgctggaggcgtcagaaatgggggcggaggcgaggagacggcaactgagttgattgggtgtgatggttggcattcaatcttagttgcattagacggtccttattattccgatgatgtggctcaatctagtgatggtgggaaactattttaaattcttgagggatcctcgttatttgcatgtcatctaaatggttatgaaaaaaattgaaaaagtttaacatgatagattaatatgaaactttattttttactacttcagatgagtcgtaagtgtttactaaaattaaatacttctagaaatgtaatcttgacacctttttaaagatagcataaataaaattgctgatgaaacctaaaggttatcacattaagttttgttatatgcaaaaatcttcaatgaaacatgaagaatatgtctaatgcaagcacttcaataagattgactcgactaccttaacatgtggtggctttacatcagcaataaaaacgatttaacgagctgattcagttaagtacgtgctttttaataaaattgaacagaggtgaatttttgcaataaaataacttgtaagggagaatattaaatttctagtaacttatgatattgtttccgtaattttctattttcgaatcggacttccatgcacattgagcttgcctgttcgcttcgcgtggtgtcgctcgaacactcgtgtaacagactaacagagtagtaacggacctaccctcttctagcctcttctttcgacatgacatgatctttgatcttaaaaacgtcggcaccagcaagcgatccgtcatgttgagcaagacgccactgcgaatattatccgcatggttgtcgtggccgctgtgcccattccataatggagttatcaatttgcacggagaattaaacggcgagcaagaaccagtgaaccaccaataatggcagctgacgagcagtaatggcaggtcccggcgttggtgcaggagctattagccaccgtgcaggagccacccggccggttcgtgcagccggagcagcaccgccccgacgccgctcctcccgcatcgtttcccattgtcgaccttggccgactgtcctcgccatcgccagatgatgacggcggcggcgacgaagccgccaagctccggcgagcgctcgattcttggggactcctccaggtaattaaccagccttatatatgtcgatctccgctttggttgatgagaattcttggggactcgctgatgaaagagaatccgttcttgttcaggttactaaccatgggatcgaagcttctctgatggacgaactgatgagcgcgtcaaaagagttcttcagacaaccactccagatgaagcgagaattcagcaatctgaatgacggcgagcaattccgggccgaagggtacgggaatgataaggtgaggagcaaggaccagatcctggactggtctgattggatctacctcaaagtggagcctgaagacgagaggaatctcgcactctggccaaaacatcccagttctttcaggtgaccaacaaatcattctgtttcaaccatcccgcatactgagaaaaaatatttttatattgccgaaagaaaaaaaaggagtaatagatctgaaatttcggaaacttttcggtctagaataatttgaaatttgaacaatttttggcgaaagtaataaattttgttaaattcactagaagaatgaaaaaatttgggcaaaaaattatccttggactcaaattcccaaaatttcgggcttgttcagattgatgtcatttcacaccataccattttttggtagagttactagatgtgcatcaatttaattttttaccaaactttaataaatacataagaaatcctgccaaaatttattaagttttattttggctgcaatctgaattaccccttcgtagacctgttaccgaaatatggaaccctcctgagaaatgtatttacatttattatcagctttgtgccaagtgtgtgttctttctgcagggatgccctgcatgagttcgtggtgagatgcaggagggtgaaacgcgacgtccttagagcgatggcgaggatcgcggggctggacgacgacgatcagcacttcgtcgatcagctcggcggcagggcgaccgtgcatgcccgattcaactactacccgccgtgcccaaggcccgatctcgtgatgggcataaagcctcactccgacggcacggtcatcaccgttctcctggttgcccgcggcgccgacgggcttcaggttctcaggtatggggtctggtacagcgtgccatcatcgagcactcacgccttgctgatcaatgtaggggaatccacggaggtaagccttgtgtagttcccaactttttcatcaaatttttaacttttccatcacattaaaacttttctacacacatatactttcaattttttctttcaaactttcaattttagtcaaacttctaattttggcgtggaactaaacacatcaccgatttctccttgtttcttggcatgatactgatggtacaatataattcagacttctggatgttgacttgacgcatcgaatcgaacggtgtttcgacgcaggtaatgagcaatgggatgttcagaagcccggtgcatagggttgtgaacagtgcagagaaagagaggatctcgctggccatgagaagcggctgacactgtacaagaaaatgaaagcaagggacttcttggttgggctctctgaacatttttctcgaggcacaagatttgttgacacgctcaagatcagtccttagtttcttaggctattggcaatccactcgtgctgtattgcaattgcagaggtaacagaaagtatttttagcacctaggtgtgtgtgtatatatatatatatgcacctagtgcatgcaagtcaacatgtgatttaaatagttaaataaaaatgtaaaaaaattggtaacataaatggtgatgatataaatttgtacacaaacatgaaactataaattcgctctacacttaagaacaaaaaaaatcagctttgctctacacaaacaaagttctgtttctgtttagcattgcatgtttttatatggatttctagcatcacaatatatctaattattttttcatttttcttctaaaactatttaggctgcatgcaaaaattaatgggtgcgattgcacctagtaggtgtagaaaaatcaaaaagtaatattttctttcttttttttcgacagcattaggactaagcaatagcaaccaaagctagaaagtaagaacaaaaaaggaagaagaaaagaattacatggcatacgcatatgctagctagggtgtcccaagtatgcgagatttaattaacatgttaaacatatgcctggtttagttcccaactttttatttaaagttccaactttttcatcacatcaaactttttttatacacacaaacttctaactttttcgtcacatcgttttaatttcaatcaaactttcaattttaacgtgaactaaacacacccatagaagttggaactgacaagtcaagatgttgcaaatttggaattctgcttatcctcgatggaaatgattccttgtgcaagtaaaagacaccaaagcgaggaaaagttcgttatagaggaaggtatgattgatctctgagagattgttttggtttaggatgagatacgccaatggtgaggagatatttgagattttcataatagacccaacaagtttattaattgcaaggtctaacagtacaagtgaggagtagggatgaaaacggagcggatacggacggataatgctcatatcatattcgttttcatattttttgccggatacggaaacgaatatggatagctcgaatacggaaacaaatacggactatctcgaatacgaataagaatcgaatatgatcggacatgaatacggaaacaaatttttctcggaacatgaaaaccaattcaacttctaatagaaataaatatcaacatatataattagctcattttatataaaatgtagtataatttataaatatttttaaaattttaaataatattaataatgtggactagtgttaagagatgaactactattaaaatctaaaaaggtatattgaaggtcatagagttataaagaaatagggtatgtcttgtggcttctgcggatatccgaatagcactgttcaccggatatccgaattattatccatatccgacggaaccctgataccatattcgtattcgtttccgagagaaaatatccgtattcgtatccgtatccgaactatccgagaattatccgatccgagaggtatccatattcgtttttatccggagcggacggaaactatccgctccgttttcatccctagcgaggagctattgaagagaggaaaaggggatcccccatcgagatcattgttagttaagtaaagcaattggactgatgaactattaatttgatagcggaggtggaaatgtgtcacaccctaaaaatcctaaatatataaattgttgtttaaatggaattattagaatttatttttaaaagcctagaagagaagatctaattttaattaataaattccaacataaaatggggccagataaaatttcattaaatactttgcttaattctataattcctagatttttctgggatttatttgagctaaagaagtatttttaataaatagaattgtatttcatgaataatttaaattgaaaaaaggtttttaaaagtctcttttggctttgggccgaaagtcggcacaaaaccttctctctctccccggcccaagtcggcccagtccgccgcagctgcgcacgcgccctcgctcgctgacaggtggggcccgcctgtcaggtcatcgtcttcctcgcgccgctgccggccgaaaccctagcgccgccgccgctttccaattcggccgcgtctttcccgatctggtgaaatcgattgaggggaaatgtttcccgagatctcctctaccttttctcttttggaatcatcctctaaattgctttggaagttcgtggattcgaggtcgaatcggatcggtctctttcctccgaaccccgaggtttccttcgcgtcgccggtcgccgtgggccttcgccgctgcctccttgcccctataaaaggatccccggtgtctcctctacccaccgccaccctcgccttcgtctctcgtcgtcggaagcgccctagcgccgtgtaacctcgagtcgccgtcatcgccgtcgctccagccgtgcgccgccgccgttccggtcgtcgtcgtcgctcggggaggttgccatcgtggtcgccaagtcaccgccgtcctcgtccgccccttcgccgccgctgtagatcgccggagcaccgccgtcgtcatcaagccgaagaccgccgccgcttcttcctcgtcgccgtcgccgtccgttgatcttccgccgacgttttggtcatcggtgagttcgccgcgtcgcgctctacgtcctggtgccctccgttcgtgccgaagcgtcgttcgccggcgagtgtgcaagcccgagccgccgccggtggtgacgtcaccgctgacgtcatcagggtccgtctgccttgagccgccgtagacccgatcgatctcggccgtccgttttggatggatcgatctcggccgttcgttcccgtgaaccgctgccgtgcgcccgatccaccgcaaaccctagccgctgacgcaataatttccttttccttttcaaaaataattcattattgcgtcataattccattaaaatccatataagtgttttaatccgatttaatctttaaaaattcataactaattcatctgagctcggatttagttggttcaagtctctaaatttttctaaaattgagatctacatgttaaaaatatccacatgttctgttcatgcttgtttatgtgctgttttggtgtttttgctcttttctgtttagattccgacgtttctggagagtccgttttcgcaggagaagaatttgaagagttccaaggccagcaaggcaagtcacacagatcccaaacaaccctttgagcatgttgatcccatttaaagctattgtttctattcaaatattgcatttattttcgaatgtcattgggtggaatcaacctattgtttgttatagccttttgttcttgattactttattccttgataccttgggttattatgacttgactagttgagctttatatatattggttcagctagatattagatgtgattgcttagccatgcttagaaacaatagcacactattgggataacttatgactcactattatttaatgatggcttaatgatagctcacgatggtcaatcgtgattggttaattaattatttgccaactaaaacttgataatggtgggttgtgagcacatggttttgagagtcgtgctcatgacaattaaggaccggttcacgagtttcggttgtgaaacattaatcgtgccaaccacaagccagcgtgggcaacggctttaccttttgtatagcatggttcattgcggggcaccagactgagaagtggcggagataagcccacgggggtcgctggggagtccatgccttgtttataagggggtgattatgatccaggaatggtgcgctgcggtggattgtgttgtgcgaggggtactgtcacagctcctttctgaggtaccgtggtggtattgaggtacatggtgacatgatgtggggctgtgtcttgtgggtacagtggtacacctctgatcagagtaaaactattcgaatagccgtgcccgcggttatgggcgggtctaacaatgtctttcgtgattagtctcacacctctcatcatgataatagatgctataaatggtaataatttatttagctcctggtttggaatggtatattcctggtttggagatagatctgtacagccgggtatggttgttcagaatggttgggcctatacaacagggtatgttgtatagcgttggattaatattgattaattattacttaactgttttattaaattctgaaatgtttattaaatgctgtttatgcaaatgaaaccctattatgccatcctttgtgattcctgtgcacttgcatatttgctgcgtgacttgctgagtatgtcatatactcaccttgcaatcattcatcagaggaagagttctacagtgatgctgatggtgtggaggattaggtgtagccctggtcaagctgcctgtggagtggagtcgtctgcgccgtttatcttatctttccgctgcttagatctttattgattgagaggaactatctacctctgtaatgacattttattcgcttattaattagagtaataactgcactctattatcaatttgttattgtgtgcctcagctgattcctggacgagggttcacacacatgtaagcgtttggaattttggatagaaattccgggcgtgacaaaatggaacgcctccggtgaggctgttgtttgtgagaatgacaaatctaataattaaataacactaccggagaaaccatctttcataggttggtcaaaatccacaatagtctcggttcaagtagaaatcgggactagaaaccatttttagtcccggttctatttgtgtcggacgatgtcagggcaccgaggatctttagtccactaaaaatagatctttagccccagttgatatcatcaaccgggaaaccgggactaaatatctccctcctacgtcttaaatagatcgaaccagagactagagacttagacttcctcatccttatctcttagtgctagacagatctagacttcctcatccacatatcttctctcaccatttctctcgctgtctatgtactctctcgttcctcatccacatatcttctgcagcggagtcgacgggagaaggggcggtggctgctgggcagagtcggcggcggccagatgggggcggcggccgccgccgggctggggaggcaacggcggcccgcgacaggaggaggtagtggcccgcggcaggtggcaggctgcgagcgggaggcggcggcctgcggcatgcggaggacttgatttggggatttgattgttttttttaagaatttgtgattcattagatatgtgttatttgatttgtgatgcatgtgtgatgtaacttttttagaatttgtgatgtactatttttgacaatttgtgatatgaatcttatatgatatgtgatgttgttactttgatttggggatgtagggagcaactcgatttggtatttgtgatgattttgtgattttggtgagtttggcgtgaaatcaatattcaaacaacaataaaaaaaagaagaacatgcgctaccctctctattcaaccgggaataatgattcccctctttagtcccggttggtaacactaaccaggaataaagatgaatctttagtcccgcttattttaaccgttgtaggatcgagatgtcgactagaggggaagggggaggggtaaataggcgatttaaaactaaatgacacctaatcaaaactaacctaagttgctaggtttggtgaatgtgaactctaactaagcaactaagttatgttttgcaaacctagggtgatagtggatcaattatatctctaggaaagtaaatcacactcctatgtcaatgtttagcaatcctagggtgatatgatctcaagtatgtctctagaaatgtaaattgcacaaatgtaaatgcgacaatcaaatgagacaaggagacaagagatttttcaccgaggttcggaaactcgccggtttcctactccccgttgaggcgagcccaactccaccactcaaccacgaagccaccgcacgcccccttcgtcaaggggtgggcaaggcgtgagccggcccacggagaggactacccaagcctcgatcactagggtagttcttccttcactctgaaggtggtgaactccaaaccactcacaaaccggcgccgggcctcctccacaatcttctcggagaggtcaccgggcaactcctccacaagccgtctaggaggcggcaacctccaagagtaacaagcaatgacccggcgtggagatgatcaatcaagtgccacactagctctacaagtggaagcaatgtacttgactcttggctaattaaccctctaacacactagatggatgaacacaaagctcaagtgggtgtgatagaggtgcaaggggtgtatacgattgaattgggtgccaagagagaccccttgttgctggagggggagtatttatactcccaccaaccaaaactagccgttggggacgaaatcccccaattttgtgctctgccggtctgaccggacgtatgcggccggtcagaccgtgctactttgcaacggctagaaaactagccgttgtagtgctgtcagagggccccatcggcctggccggtcagaccggcctcggctcggtcagaccgccatcggctcggtttgaccgaatacggctccgtcggctctgtatcagccaccctgagcagcaccatcccggcctctagtgggccggtctgaccgcgcatgtgccgccggtcagaccggccttatgcgccggtcagaccgccgtcttgtggccagtcagaccggccagggcacgccggtctgaccgcccctggtcaggccgaaaccagtgaaatcccaagtgattgtgtgtgtgatgaaaagcgagcacaagtctaaatgcataatgacctaatgtggcaattaaaatcatctctttgctaggtcattacccctcttaatagtacggcgaaactaaaaaataaactagcaaatttgatcgccctacaccttgatcaattctaaattaaagcgctagttttaccgtcttctttctctttgctttgcgccgtcaattttaatccatcgatagtcatccatgcgcacacatgacgtggacctaacttaaaatattatctcaatagcaactgttagtccacaattagcatttgtcattaattaccaaaattaacaatgggggcctagatgcttcaatctccccctttttggtaattgatgacaaacagcacaaatatatatataatcaaacatagatcacatggacatatattgtcaaaagctccccctaaacatgtgcatatcaatcatagacaacaaatatggaaccaatgcacatttcaatttcacattccaataagcacaaacacataagcaatatttcaatgtgaacttcaagaaatattcattcatgaacataagatggtcacatatatatcaatatcgcatacaccatccatcatcgcacaagttcacatcacttaaccaatcaaatcacaaaagtcacaaatcatcctaaaagggctcacaaataaacataggctattacaagaccacgaagggtccaaatgacatagagtttaacaaaacgacaaagaacacacaatatagagtaatagcccatacccatacaaaatatagcccaaaacaccttagcctattagaaatgagggcactatcctcactactactagtcccaacccacaaaacataaagcactcttttctcccccttttggcatcaagcaccaaaaatgtcttcactcttgtggaggagaaggaggacgcgccgaagtggaaggatgaggagcatcacgacgacgatgatacacaaatgcttgggagctctccaacagttggactcgagaatccaacgtacccactctagtgtgcaatctccccacggaagcattcaagtctccaacgtccgtgcagaagccacgaacatcctcatgtaaagcttcatgcccggtagacaagcgttgaatgctttcacttagggtattaatagccccaagtaccgggttgaagtatttgttgggttgcattccaaaataagcatactgtagatggaagaaagcatttggatcatacccaggaggaggaggaggtgctgagcttgagctagctccaggatgagaggagggcgccggcctaggagcacggggagctccaagctgaaggcggggcttgtactgcttgtgcttcttcaaattttgcccagcagccccaagcttgtcttgaatcaacctcatgatgtaagtggcataatagattccctgagtaaaggtccccttggagatggcaatctcttgcatcatgagagacacaatgtcgaactgacggccctgaatgatggcatcgatgacgtgccaaaccacccccctaatatcatcattgttaccaaggcgagggaggatggtagctctcacaatcctgttaaccacactggggatagtcctcaggccggcaaccttcccatgtgtgtaccgtacttcatcttcataaaactgagagagatagtctatggagagtggattatgggtgtgctcctcatgcaagtcatctccaaagtccaagcaaatattgaggagccaccggaattgcctcctgtagatagaacactgaagggtatcggacatccacttcaactcactatagtcatctcattgtagtattgtttgagagtcacaatccggtcaatgcaaacagtcttgaagagatcctgcaagccctcaaactctggagtctcattgatgtctctccaagaaatccacttatgctctgcaaaaactttccctgcataaatctgctcatacacactcttctggaaagcggtgtgaaaacggggatccggggtatcccgaggcctcaaaaactgatcatggtgcctcaagatggtatactgcgatggattcctcatgttcacaacaaactggatggagggatcaatgtgcatatcatcacttccttcatcctcatcctctccacttccactgtcatcatctctactagcctcctcactagccccttcaacattggcctcaacctcttcatcactttgagcgtactcatctccgctcgattcctcaggctcactcatgggatccggagtgggtgcacgacgaccatggcgagtgcggggaggcatcactgtcaaagagcaaaggatgatagatattagcaataattctagaaacaatttggagaggtgaaaatttgcttatatcctgtggaggggtggtcagaccacagccagcagggtggtaagactgacggcatcaggccggtgagatcgcccgctggtggccggtcagaccgacggctgccggccggtcagaccggcggctgacccacggtcagaccgcctgtggctttgggcagacctcctcccacaagttcaagcatccaaaaattttcacatcttcacatttgagtctaaaaattgctagaacaatatagctcaagattggaactagaacatcaaagggtatggcctagttcatcaagattggaataactacccatagccctagggtgaaatagattgatttgagagaatgcacaagagagagagagtgatttaccggttgaaggggatgaatcacaccaagaaactaccctctactggtgcaaatcgaagaacacctcgtgcttcacctagggttccatgccatggatcaaaaactcaacaaaaacacgaactaatccatggaatagagagaggaagcggaggagaatcacttacggtgtaaccggagagaaatccacggtcaaaccgagaggatttggtggaggaaagagttagggtttgagggaaggtgagagagagagagagagagttttttgagttggggatgaatggggatgagatgggagagggtaggtgcgggatggagaagaaaaggggcaaaactgcctgggcccacctcgaccggtcagaccggccctattcggccggtcagaccgccgcacctggccggtcagaccgccaggccccctgccggctgtgcacagcccttgcacaagccggcaacccccacacaacaaaattcaacaaaaatttaatttttggagcaattttaaaatgtgtgagttgaaatattgccaaccattcataacatttgaaaattatgaagatttgcaacaaaactcacttgagtgctaggaggtgaccttttatggtttataggggtttttgggcgaatttgattttcaaataacttttgaatgattaggtttttgaaatagatttgaataccaaaaacatatcaaatcttcttctctaccaactttgttttgaaacttttatcaaattccttctcaatctcattttggggataaatctcattttggccaaaactaagaatctagtttcttcaaaatagggccaatatggcatttttattcaaaaatcatttttcttgcaatgtgaggcttggaaaacatataggaaaccttttgaaacattttccaagagatagttttcaaattacattgattttgcaaaagttttgtcttaggttgacttgggcattttgaaaatactactagcaccactagttgatttgctcacatataaaaggaagtagagcacatgtaagagtgcaaaactcccccttaatgtgacatgctccattttcgcaatgaagaaccaaatggcaataaatccaaagcataagagcaaatgagagcaaatatacataatgcaaaaagaagcaaccatggtgcaccatctcaagccacattagagaaatctatgacatttaactcattcctcaatttgcaaaagcgggttcatcaagaggcttggtaaagatatcggctagttgatcctcggttcttatgtgtctaatgactatgtcacacttgacaacatggtctcttaggaagtgatggcatatgtcaatatgcttggttctagaatgttggaccgggttatttgttatctttatgacactatcattgtcacataggagtggggttttggtgaaggatatgccatagtccaacaatgtttatttcatccaaagcaattgggcacaacagctacccgtcgaaacatattctgcctcggcggtagagagggctacggagttttgtttcttggatgaccatgacacaagggatctaccaagcatttggcaactaccagatgtgctctttctatccactttgcaaccggcataatccgaatcggaatagccaacaagcttaaacttagcaccttttgggtaccacaagccaatagtagaagaatgatttaaatatcttagaatccttttcacggccactaagtgacactccttaggagcggcttgaaaccgtgcacacatgcaaacactaaacatgatatccgacctagatgcggtaaggtaaagcaagctaccaatcatagaacgataaagctttaaatctactggtttacctccctcatcaaggtcgagatgcccgttggttgccataggtgtcttaatgggcttcgcatcctccaagccaaacctcttgagtagatccttgatgtacttggtttggctcacgaacgtcccatccttgagttgcttgatttgaagtccaaggaagaagtccaactctccattcatggacatctcaaatttcctagacatcatatcaccaaattccttgcaaaatacctcattagtagaaccgaatatgatgtcatcaacataaatttgacacacaaagaaatcatctccaatgatttttgtgaaaagggtggtgtcaacttttctaattttgaaatcctttgacaaaagaaaatctctcaatctttcataccaagccctagaagcttgttttaaaccataaagagcttttgagagtttataaacatggttaggaagaaagcacatgacaagccaagatcacaaatttgagcaaccgaaagcaaatagaaatttagagatttaacaagagaaatattatcaattgacaaatcattggagatagcaattttacctaacccaattacctttcctttgctattgtctccaaatgtcactttctcttgttctttccctcctactttaaatatggtgaacatagccctatcactggtcatgtgttgagtgcatccactatcaagcacccaatggctcccaccagtgcggtagttcacctagaaaagaagatcaagctcttttaggtacccaaactggtttgggtccttggaggttagagaccaaagctatgggcacccaaatgacattctttttaccaccgagtgtaggggaacccacatatctagcaacaatgctaccatcatgagccgtcctaagtatataatgagaatcaaacatgcatgtcttaggaggcttaccaccagagcaatcattcaccaaatgcccaacctcacggcacttggagcaatacttaccattgctcttgacaaaacgagtggcacggtgagaaggtttcttacccttcattggaatgaatcaaagtccctccttgttaaggatgcatcgttgctcactcaaaatcttgtcaagagtgttcttacccttgaagcacctctccaaactcttgttgagcttggccacttgctccttaagctcattgttctcaacaacaagtgaggcatcacaaatggaaatacaagagctagagctagatctaggcatatccacaagatcatcacaagaagtagaaatgctagatgatgcaacatgagcaatatggcaagtagcactatcatcaagcaaatcacaatatatgccaacatcatgagagctccatgttgagtagtggaaaggaggttgtcatgagtttccttaagattctcatgagaaatggtgagtctctcatgagaggcctttagctcctcatacaagacctccaaagaagcacgatccttctttagggccttaaacttgacgatctccttctcactataagcatggagctcctcaaacatactcacaagctcatcatcggaaacatcatcacaatcatcatcactctcactatcactaagagatgttaccttagaggagccctttgccatgagacaaagtggagcgaagagtgatggagcctccttgatggcaacaacggccatcttcttcttcttggagcttgcatcatcaccaccttcttcctcggacccggatgaggtggagctctcctcatttgagtcccattccgcgatgaatgcctcaatcttcttgccttccttcttgagcttcttcatgagcttgtagcctccactcttcttcttggatgacttgtctccatcatcatccttggaagggcacttggaagcaaactgtcccttctcaccacactcaaagcacctcaagttggagagagtcttgttgggtcttctatttcttctcctatttgagttggagccccttcctctctcatttctccttcccaagagatcattgaaccttctagtaagaaggacaatctcttcctccaagtcctcattgacttcattcaccttgcccttgcccttatcttcaacttcagcttggagagcaatgcacttcttggaaggtgaggcttcctccatctccttcttctttaacttgtacatgtcattggtgttgatcttccccaagaggcttgcgggtgtcatccttgacatgtcggagttgatgagcatggtgacaagggtctcatacttctccggtagagccctaagcatcttttgggcaacctcaagatcggtgtaattttccccaagccccttgagatcattcacattgacattgaacctcccatacatgtcattcacactctcatgaggcaacatggagaatgtctcatattggatcttgaggaaatgaagcttggcatccttgtactcgcttgtgccctcatggatctccgccaacttgttccaaatctcatatgcggtctcaaggttgctcactctatcgaactcctcttggctcaaagagttggacaaagcattcatggcttgggcattgagttggaggttgcggtgatcaatctccgtcaagggcgtgccggtgatagcaaagcctacatccacaatactccaaatatggaggctcatagctttgaggtgagtagacattttaattttccaagtggagtagtttgtgccattaaacatgggagccttccctacatggttcacctcattcgacatcttctctctaggcggtgaagcctaattaagagagaccaagctctgataccacttgtaggatcgagatgtcgactagagggggtgaataggcgatttaaaactaaatgacacctaatcaaaactaacctaagttgataggcttggtgagggtgaactctaactaagcaactaagttatgttttgcaaacctagggtgatagtggctcaattatatctctaggaaagtaaatcacactcctatgtcaatgtttagcaatcctagggtgatatgatctcaagtatgtctctagaaatgtaaattgcacaaatgtaaatgcgacaatcaaatgagacaaggagacaagagatttttcaccgaggttcggaaactcgccggtttcctactccccgttgaggcgagcccaactccaccgctcaaccacgaagccaccacacgcccccttcgtcaaggggtgggcaaggcgggagctggcccacggagaggactacctaagcctcgatcactagggtagttcttccttcactccgaaggtggtgaactccaaaccactcacaaaccggcgccgggcctcctccacaatcttctcggagaggtcaccgggcaactcctccacaagccgtctaggaggcggcaacctccaagagtaacaagcaatgacccggcatggagatgatcaatcaaattccacactagctctacaactggaagcaatgcacttgactcttggctaattaaccctctaacacactagatggatgaacacaaagctcaagtgggtgtgagagaggtgcaaggggtgtatgcaattgaattgggtgccaagagagaccccttgctgctggagggggagtatttatactcccaccaaccaaaactagccgttgggggcgaaatcccccaactttgtgctctgccagtctgaccggaggtatgcggccggtcagaccgtgctactctgcaacggctagaaaactagccgttgtagtgttgtcagagggccccatcggcctagtcgatcacaccggcctcggctcggtctgaccgaatacggctccgtcggctctgtatcggccaccccgagcagcaccatcccgtcctctagggggccggtttgaccgcgcatgtgccgccggtcagaccggccttatgcgcggcggccggtcagaccggccaaggcacgccggtcagaccgccactatgtggccggtctgaccgcccctggtcaagccgaaaccagtaaaatcccaagtgattgtgtgtgtgatgaaaagcgagcacaagtctaaatgcataatgatctaatgtggcaattaaaatcatctctttgctaggtcattacccctcttaatagtacggcgaaactaaaaaataaactagcaaatttgatcgccctacacctcgatcaattctaaattaaagcgctagttttaccgtcttctttctctttgctttgcgccgtcaattttaatccatcgatagtcatccatgcgcacacatgacgtggacctaacttaaaatattatctcaatagcaacggttagtccacaattagcgtttgtcattaattaccaaaattaacaatgggggcctagatgcttcaaccggggcatctttggttccggattcatggttccggttgcatagccgggactatagggggttacgaaccgtgggtgaaaaccctttgtccagcagtgtaagttgcctccaagagacaaaggaatatcaccacttagcttgaggcaaagcagcgcctaaatatcagtgtctaacactgatagaaaaaaacgtttttccagacggtcaaaacacgttttcgcaggcgaagaaaccttccacctggatctaaactgctgtaaaaatcccagtttttacaagcagaccaaagcaccgcctgcaaaaatgattttcacaagcagcagtttgtatctttcccggcgctgcagtagctacagtatccccacctgcgaaaatactcacggcaccaaaaaaaatttcccgccacccccaccccctccctaggtttcaaatcacaaatcacaaattctcacaaatctcatccaggaaacaaaatccaatcacaaacatccatatatcaacacaaagcattggattcaaatccacaacatcaacttacaagttaacattaatcaacaagtaaacttaaaaaaaaaagcaacgtcgtcgtcgccggcgaactcttttgtgtgcagtggccgccgccgtcaccctcccccctcgggccggatctgggagggagggaggagtccgctgccaccaccgtcctccccactcctcgtaggggccagatttgggagagggaggggaggggagccgcctccgcgcagccgttgcccgcgtccgtgccgccgtcgccgtctacaccgccactgtcgctccccctcctctcgctagatctaggagcggggagggaaagagggggagccgccgccgccgtcgccccgtccgcaccgccgccgcctcatccgcgccactgccgtcgctccccctcctccagctagatgtaggagcggggaggagagagggggggcgccaccccgtccgcgctgacgtcgccatccacgccgccgcgttcgcgccgctgccgtcgctcctcctcctctagcagggaggaagagaggcagagccgccgtgccgccgtcactcccctcctctggttggattgggagggaggggaggggaggggaggggaggagagtgacgggccagtgagagagagagagagagtgtgtgtgtgtgttgagagggaaataagtggtggccggtgaggaggggtggagtagaagataagaaagagttaagattttttttgaggggtggagccggcaggcagaccacataaggttccacctgcgaaaatcaatgtattttcgcatttgcctggaaaaattaattttcgcaggtggataacaaaaatccaccccggtttatattttcgtaggaggatatttggctccgagggtcatacccacctggaaaaataaaaggccagtgtcgctaaaaatgtttttctagtagtgtaatccattgtggaatagtgcagccatgaagcttggaaagataagatatgcagtggagagatatgcagtggagaggaagcatgagaggcatccaaacaggatgtcagatccgtatatgtatataataaattcggagaaaactaccgatcaatctacctatcctatcggtcactccaatacatacatgtattaatctttaaaatatttttttatcctagactacttatcttatatacgatccgactacatcattatatttattataatctaatctctataacaagataccatataattatattttgataaagtaaaacatatgttttaaaccgttaaaactcaatgtttcgtatgttatagcgacatgtttcagtgtatgtttcaccatgttttatagaacccactcaattacttgtccctactctctctctaatccattcatccatccatgcatacattcaacgattttcaaaacgatttttctcataaattacttatccgatctataatttaatcacaccgttatattcattgtaattaaatttttacaacaaaatatcacatgattatattctgatgaaaaaaaaagtcatattttaatacgttaacacctaatgttttatacaaaatggcaacatgtttcaacgtgtctcttcactgtatttcacaaaatttttaaatatttcaatggctgattttttttttcactaatggtcaactaaaatatttatttaatcatttttttatagaaatctggtgctcgattacgagtttcctccaatggagttccaacaaaattacgatgaacaagaaaagtagttgggtggagttaacacacaattaatcatgcatgtatttcagattttcatttgacccaaaaacttcatcataaaataagttaacctagtacgtaccctagttttacgaatctgaataaacaaatgtctaaatttgtagtataggatatattacatcttataataggttaacttatattgggatgaatggaaaacatgattatgcatttgtcgaagggagtacatatggttatgcatttgtcatgcgttggatcgatcttctctaatatgtcgtcaacctcaaagccaaaacgacgaagaaattatgaagtaaactactccctctgtcccaatatagatgttactttaggattcaaaatttgtccaaaaaactcaaaaagcttgttactttgaagtacattttgtcacatcaatcatctccaattcaaaattttctccattctaccctcttcctaccaaccatgtatcatttaattgagggcactatagtcatttttgtaaacattaatttttgctaaataacctaggatgataactatattgggacagaggtaatacggcattaaatatagtttctggtcttgcacaggtagtgaacttttaacgtgcaaccaagattttttgtgatagaaatgtagcatgcacccgtgaccacggaaattcaacatacaattcaactgaacattgttgcactcatgtgcaatcgatgaactcttggagtaagagtatgttatgtagcacatccagacaaagatgaattggctgtatagacttcacatgtagtgctgcaagttaaaagccagttcctgtttaacaaaatgtcgataacattgataaacggctttgctgccttgcttgacggctgatgctactctaaattggtttagccattccattgaccatgaatcatatcacaagcttgtcacaaatgactaaaatcatggaactcagattccaaccctttgaccaaaaccatagaatgcagacagaatactaacttttcttattggcagccagagaatgtctctcgtcaaataggaactactttttttttttgcttttggggcaaagaactattttttctttccgaacaaactaaagatatgcacatcatttcattactaagaagaagatacacataggaggagaatccagaaactccccaccctaaacacttaaaaacagaaaaacaagaccacttgagccgcaagggccatagacctagctctgtgaagctccggctaagctccaaagtatgccttcatttgttactgtttgcagcaccactgacaccctcagaattgagctattgaaagctcattcatgtgtttcacaatttcttggttacataactaaagaactattgcgtggttacataaccatgaaatagcagcagaacacctagcaacatgaaaaaaaaatgttacttggacccataaagagagttaaacacgcaaaacttacaaaccatgaaaaatatttggaaatttcaaatgttcatttaacccatagatgtcacttcaaccgttcttagttaataaaaaaaatgaactctggctaaacaatcaaggtaaaatcttaagcttgctctaaattgtaactgatgtaatctattaactattaaagtaatagaaaacgaagcctccacgttcgctctcgtagcctagaaattctcatattaataattggagaaaaagaaaaaactgagtccatatatccatataggaatacaatttaaaaataactgaaatccagaattatttaaaaataactgaaatccggaattaaaaataaggaatattgaaagagaagactagagtccataccgatatacaatggaactaatggaaattcgaaattaaaaaattaaaaaaataaaattagaggttagagtagtccatatagaaatacaatttagaatctctcatggcctataaattttcatattaattggagaaaaggaaaaaacaaagctcatataggaatacaatttaaaaatagctgaaattcggaattaaaaataaggaatataaaaaaaaagactagaatccataacagtatacaatagaactaatggaaattcggaaattaaaaataagaaaatatatatgctattatatgaggaaaaacataaggatgctaaccgtgcaatttgcgcgagccaccatctagttatattattaggtaacaaccaaaacaataactaaccaaagtaaaaactgccaatgctatgaatagtaatcaatagagttagtaaccatgcatagtaacttctgaaacatataatttaagacgtgttttacaatgtctctactggtatactggtagtaaaatcaatttagaccattaatattttctaatatatatatagacacacacacacacacactaatgacccaaaccaatggtagtagaataatttgaactactggaagtagaactcataaatcaacgagttggatcatttcttctggtagtaaaatactaccagtagagaccaccgtaaaggtatccatgatttaaggatttattcattttattacacttcattggaatccctacatccaaaagtctaagacctatttcttttgtcaccaagactaaaaagtaattaactcattcaccatgtgacaaaaccaatgaacatgcaatcaataagtactaaaatagcttcttgggttccgattaacaatttaatttagcacgtagtgattacagataggccttagctttttgaaaaaaaaaacaaaaaataaaataggtcttagacttttggatggaaggagtattctacaaatgcttaaacctttttcttcattaaaattgcgaaaggtgaaaggatccacccataggatgtctgacaattcaaggtactcatcgtccagcaactataaattctgtaattgcatcccctgccacccccctaccctccctcacaagcgcctcttgctcgctggtagctaaagtacttaatacccctacaaaatccatatgattgacctacttcagtcattcagcgtaggtgtgaacttctaataccttttaaccaattctgttagtagatcaaaactcaaaagaaaacatgttttcaaaagttcatcttcgacgtttcttttgattacacgtcaatctgcattccactaaagactcatgtgttctaacagtgttccttatcacccctatttccaagagcaatgcatgattattttttcttctcgtcacaaaatttcttaggtaattactacctagagtacttactcgacttagatctacctctaagagtctttcaactaatcattgtctagaatcaatatagcagtatctattttatgctactggcatttcatgcatatccttaactgttacaggttgtgcttatatgcaccttcgcttaaattcaccttgatcctgcatcactagagggcaaagaataccacatcagttgctcctgtccatgtaggctgggtgtggactacattaaaacggtgcttctgagggagcgaacatggaggtagtgtaggactgtagggcttagggaggggtgagtgtgttgctggcttgttcctggccttggcctcaatggtgcagactttggcaaaggaatgggaagcaccgaagggtaagaggggtggagatggggagagatagaaggctttggctgtggcggttgggaggaggcagcagtgacagtggcgatgaacaggaggagatgcagcagtgagccctctgcttcttcctatccatcgctggattccttcatttgctcctgtcctccttgcaaccttcatcctgctcctcttcctagacctgttcctcctcatcctattcctcttcaccagcggaataggcatctccacaccactgccactcatatgcgcctgtgtgttgctgagggcatggtcctcaattgtaaaatcgttcattttggtccctcagctcattaaaatatgcacatttcaactctggccccaaatttgggatggttttcaatggcttggtgtctgtggaaccaacatatgtaaaaagtaccgcatcaccataccgatcaataatttaaaaaaaacaaaaataaagaaactacgaggatggctttatttacaaaaactaaatttcagctctgaggactggttctcatttgtgtgtgtatgctccattttcttctttccctttagaagtctattttaagtatgttaagctactgcatctgtatttgcttaaataggcttctatttataaagttacctcagttttagttattttcacctagtcttagttctctagctgtacattcaagatttatatgtgaagaagttcaattgagatgaaagtaaatatagctaggatcaaattgaaggaaattataagatgcattatgaatggattgcttaaccataaaaactgtgcccctcgctagatgggatcctcatgcagaaatctttgtagatttacacttcagtttgagggaagttcttgaaactcacctgctgctgttataaattccctccatgtgtccttagtgccttcctacctcagaccttgcagcaatcattgatttccaaatgaaaatcctaaaggagggcagtaatgcatcttgcactctgttgaaatcccaagcaagggaactcactgcaaaattccaacagatatcatgaataagaggacctgcattttcgatatacagcaaaggcaatgaaaagaagcctaataagcagaacgtagagatagattaatcagcatacttggttatgccttcaaaacttaccagtctgatattccattgtgtaatgtgcacaaagtgaactccaacgtaaaatgatatacagcataaaagcagaagggcaacaccaatgacaaacccatagcccacacctgccttatggcctcttaacaaactcctttcttcgcaggacttccacatttactttaatggatttcaattcacttctcttctacccagaacaaatcaatagttccaatttaccaatagtatgtgcttggtctgcaagcacattacacaagttttcagtacaacattgcaaaaccgtttgatttccatgaaaaaagaacaaaaggaccatataccttggctttttgcaccacagatccatttttaagcagcttaaatgataaagccagtcaaatgcttcccgcctggcatgttgaacaaagagaattgcagtcaggcaatgatggaaatccactgctgaaattgaatatgtataactcagatgacaactctcgagtaagaaagtgaatggtggtaaaaatttgactttgtcatcatacaccagcaagcaaaaatggcccatgatgatttaagatgaaatagcaaagaaaacactttatagttcataccaaacacaaaataattggcctcgaacaattataagattaaattgaatttcatataaataggttccatgtcccaacagaggaaactgtttttttgttcatgaagaaaccatataacagaccaatcagaaaaaataagtatatgttttacagcctgtttagcagggctccatctcttggatccttgtccggtggaggcggagctggagccaaacccagtggtactagattctcaaatttttagaagcaggtggatctgccctagaaaatacattggaagcatggagctaccttttcacagctccacaactacagatccatttacgatttggagctctatcaaacacgccctaagtacacagcctaaggctttgcaaaagaaaggctacggaaagaatatgattaaattgataatcaatgaagattatgtggtacggtcaaattatttttagccatgagattactttttcttcaaacagatagtctctttataatgaacatattcctctctatgctaaattatcccctaatacacatcttaagcacttcaagaaagctttgattagagatttttggttcaaaggatggaagtttgttaaccaaaatggcattgttacatgataggacatcattttagtttattatatagcctaagaccgtgcgttgcaatggaaaataaattgagtttctagcttattaaatcaattaataagcacttatttagtctaagtaatactatgttttttcttattgaacaagtaagtgattttgaaatttgtggggagccaatagtgaaatgagggaggacttgttgaaaggtggtgtaataatatagaattatagattgttgggctcacatgttagtggtaggggtggtgtgggaatggacaccaccactactaacattttaagtagtctaggtatatactatatcgactagaaggattttttttgtgttagaagttaaaaataattaataaatacagtacagcacaggtgataatgctagttaatgtttgattgttaaggtaggcaacattgttgagaactcagagagaatatgcaagtgcatattgatagttgtgtggaacaaagaccattgacgagctatcatttattatatatacaataagtaggccatcacagctataggttaagatttcatattttccaatgctcctttgaacatctggaagaaccagttaagaaactgaggaccatgcttattcatttagtaaaaaggtcaaatttcttacaaggggatctacatataattgtttgcaaaaggtcattgaatagtcattgacaattatatagtacaacaatcatcatgtcacagtaatagaattagatggcatgaataatatactgataaaagttacgagaacaaattgtaagagcagccaagaacatatattgttattattcatctggaagcgttcagcaataagaatcatgcttatcaatctacaaaatttaattctttggaaaaaaaaatcagagagattaagttacctgttctcatcttgcctacagtaaccgatatgtttcctagatccacaaggcttcagtttacttccttttcaacatcgcatccagaataaggtttagcttataaaaagttctatagtgacaatagccaaccctacagaatgttctaattgtaaggtcaaaaacatgatgatcagggacaaaatcttttccatcaaatatgcgattgatttcccatattttatcagcataaacaagcctgttgagaaggacagtaagaacatccatcgatagcccacttgtaagtgatttaagaaaacaagcagtagctgcatcaaatttcctttctctgcataatccatcaattattatagtataggtgacttcatctggagcaatattcttttcctccattactgaaattaagcgattcgcttcagttaactttccatggtagtaaaaccaatgaaggagtatattgtatgtcaccacatttgcagcaaatcctagactatggatcaagctcttggctaaggaggactttcccccaacacaaagactacgaatcaaaatgttgaacgtccttgtgtttggctcgataccttttttgatcatatctgttaatagcttcataatacccctccatttgcccatctcacacaaactgctcattacagtgttgtatgcaacaacaccagcataccatttcaactctgtgctcctctctaacaagtatatagcatccaaaagtcttgaggaatggcaaaggcaattcagaagaatactccaagtataagctgtgggttccaatccctcacctaacataacatccaacagctcaagtgcttccttagccttacctttcttgcagaggccattcatatatatattgtacgtgaccgtactgggcttccaatctttggtactactttccattaaaacctgttcaacttcatcaaatttgtcatcatcacacaaggccctgattagaacattgtatgtgacgacgttgggaaggcagccaagacgttccatctcggccatcagcagcttggcctccacgatgcggccatcgcggcaatatgcttgtactatgggcgtgtaagtctgcaccatcgggcggcagttcttctccagcatccagtcaagcacgccccacgcctcaacgatcttacctgcccggcacaggcccgcgatgagcgttgagtacgtaccaacgtcaggctccaccccgctcttgtggataagctcccaagcaaggtcaaactccgaccgccttgcgtgcatcttgatcaggatgttttgtgacgacgcgttgggcgctacacccgacgcgagcatttcatcgaacgccttgagggcctccccctcgcgaccggcctccgcgagcgcattgacgagcgtgttatagcacagcacgttgggcggcgcgccgccatcaccaccgtcggcggcagtccgctttagctcagcaaagacagcgaccacctcgtccaagtcgccggcgagcgccagggctttcatggccacgttgtagtctcgctccagccgccgccgcttctgctgctgcgtaggcggggtgttcgcctccggtgcgggaggagacgggaggtgctttccgtcgtcggagtcctccgaggaggagcaggaaggagaggggaggggcaggagagccgcggcggaggccgaggaggccatgcgcccgcgcatcaggaggcgagaggtgaggaggacagctatgcgcccgatggtcaccgaatggggggggcggaggccgtggtggcggtggcggcggcggcggcggcggccgtagtggttcgcgattcaaagtgaggcagaaacggcggcggggaagagtgcgttggggttttgctttggtcggcagccgcgcgatctgcctcgagaataggccggttgggctgtactgtgtagaaaacggcccattaatccattatcccctctcaacttagtgtacgattgcattgtcggtacatgaacttgtcaggtgagtataatccaatgcacgaacttgtaaaatactcgttttgatatatgaacttgtctaatgtgtacggagaaaggcgaaaagaacactacatggctaattttattgattttatggctgattaggatactatgtaaatatatatctgagaagattgctattagacatacacctatccaataaaaaatagaatggaatataatgatagtaggaaaaaggaaaaattggaaccatgccattataattttacaaattttgagatataagggttagaaatatatgaaattgaaggataaagtagagaccaaatttatacatattacatgtcttatacatactcacttcacgtatacacatcacatcttaatcaacatcagcttcataaaattaacattgccaaattattttggtcctcgtttgcacgaaaagtacgcgtactgaaacgagcactttatatgtttatgtattaaattacacccacctaacaagtttgtttgtgtaccgctaatgtaatttactcaaaatttatttagacgtcagccgtgtgtataatcttaatcatttcacatcacgaccatatataaacaactcaggttatatgtgattggtaatataataaggaactgcctacgtgtcatttgatagaaaaagaaccatcataatctcgtaaattttgaacctacgattatattatgattctatcgctacaatgattctaccttatccacttccttaccctaatcgtccactttcacctcagacgctcgatctccccaatacacaccgtgccactgctgccaccagtcttgcagggtgcaggctggccggaatcaacgtcactgactaggccccctcggtcaacctccctccctctccacctctcctctcctgttatatacatgctgtgattcaagaaattttctctagattagatgctttctcacgaagattaagaagatcaataggatggctgacaagctagcaacttaaggtagagattaagagatatcttcttctatgtttaatgctagaatatcaccttctagacatctagtttatcatagttctccgtgtaaatggtggagctatagctcctgggctgatcaggcggctccatcgctagcatctctattactactatcaattagcgaaaatactttaaatatattatcaaatattctttgccgcgcttaatggtgttactgagtttaccgctacatcgtgttatacagacaagctggataattagtgtcctattatctatgtgctctgtttttaacttatccatatagtttcaaaaaattaaaaacattgttaggaaaattagtttgcataatgagccgccacgaaggtgcagcaactctctcgagtcttctccaggcgactagagcgctacagtattgtttcccctctttctaacccctctcctcctccgattccggcggttcatcacttgtgaaggctggaagagagatcaggcctccttctttgctagtatagagtagcgtaggttgtagtttgcggcagccaggccgttctgtacgtcgagtttatcccgttttgtttcgtttgtattattttcttggtgttggagtcgacggtgctggtgatggtggttggtggtggtggtgattgttgacggtcgttagcgatcagttttgactgtcaatattaccgaaatagaatattaccgaaatagaggagaactagttatgcttataatgcatatacatgtcagaataataatattccaccagtattaggtttactaaccttttgtagaaaataatcataaagtgaaggagaatcgacatcaactcagacgataaatcaatcggacgatgtcgaggatcagacttatacatgaatgggccaagaactcagaattgacacgatgaattgggccaaaattcacaagtctacgaaagagagcaatggaggaggccacctgccgtttttaggccaggatgggccgacccatggttctgccaaacccaccccccagcgtcgtttgatccaggtttctcctgaacggctgagatggctccctaatgacggttggtgggtattaccgacctttccaaccgtcacaaccatcattgggaggccataaaaggagctctcatcctcacttcactcacacacctcaagcaagagctctctcatattctttcaagttagtttagtattcttaagctagtggaataggaatagagtagaaatcgggagtccggaaaccttcggaagagtttgggtatggctctagctttccttttctcttttgtaagctttgtactttatttagaatactcttctatatacatttatggtattgaaatacttcccgagtatatgaatacctactttacattatgttcatgttatactgaatatactgctagcttatctgggagatgctttggtgcgggtataatgtttgcatatgcaattactctatgtcatgacgatgatattagagtagtatctggtagtttaggcatggtgtctagataacgggatatcattatttagggttatatgctgcggatgagaggtgggccgctgttggtaacaactcagtacgggtattcctccgcgcgtgtatatagtcctaagttaatttcctggggagggtactccttcgtatttagccccggttgtatggttataacgggctgtcgtaaggaactcggtagtcaggggtggcttctcgaagtaccaggagggcatcgaatagagggtattagctagtatttcagatgactagaatgtatgtatactagaagtataggaatagattatctttctcttttctttccacttagcttagataatttagtatgagaatgagtagctcaactacttgtatgtcactctacccttcgattatctttaaccagttcttagactatgattatcacaagtaatatataaattattagtcaagttctctctacatgatgttcccacgggataaaataaatatgatacccttggaatactctcgggtgaaatgctacaatggtatatccgtgcgcttgcagatgaactctataaccataatataccaacaagcattgcgggtgaaattctacgtcattgctgggaattatatttctagtaatgtcgttaagaaataccaacaagcatttctagcgccattgccggggaagattcataatagagattacctgaactaatacattatatttacctctgtataatcattgcactttgcaggctaaccttggttgttttcacttttgttgtgaaaacagggtagtgcatgactggtttcaacttgccggaaaattttaaggaaaatccagaagctttcttccggagcgtcagtccgcgagtcgtcgctccttagaaaactctacagacaaagaaaccagccgtaccagtgccaccgactttcaagactatggctgacaagacactccgcgagttcgctgctccctctgttgacaatgtggccattgggccgcaaatcaacatgggagacgtggatttcggcttgaagtccagcctcatcacgatggcgcaggctagcccgttcagcggcaagcctaacgaggatccaacgctcatatgcagcagttcctggagatctatagcacgtacaccatagagggtgtcagtccagacgccgttaggctaaggctgtttctgttttcccttctcgggaaagtgaagcagtggttctacgctaaccgtgctgctgtcaacacctgggacaagtgctctacggcattcctctcgaagttcttcccgttgggcaaaactaatgccctttcgttgaaggatttccagtttccagcagacaagggacgagtccattcctgaagcatgggaacgacttcaggagtatgtagccgcccgtcctcatcatgggatggacgactggctaatcctgtagaactcctacaatggactcactcccatgtcccgcgatcactggccgcggcggctggaggagcattcttctctaagacggttcgaggagctgttgatctaatagagaagatggtctccaatatgggttggagcgaggaacgactccagacccgtcagcgaggtatgcacaccgtcaaggagacggaattactcactgccaaactagacctcctcatgaaacacctggacgaccacgacaaacggcctcaaggcaccgtcaaggccttggactcacatgtcacgtgtgaggtctgcggcggcacgggacattctgggaataactgcccggaaatccatgaggaggcgaagtacatgggcaacaataacaacgggtaccgtccacaaggaggtcaggggtggaacgagccacgcccgtattatcaaggaggtaataataatggtaacttttctaaccagccctccttgaaggatcttgttttttgcacaagctaagaccactgatgccttaagcaaaaagctagctgccaatgacaaggtcctagtgaatattaatgttaagctatatggcttcacttttgcttttcaaaaccagctgagcttcaataaaatgatagaatcccagctagctcaattggcttcattagtccctgcaaatgaatcggggaggattccggggcaacccgactcctccgttgaaaatgtcaaggcgatcacgacgaggtgaggtatgtccactcgtgatccgccatatcctaaccatgtaggaaccaatgggatagccaaggaagtgccatccaatgactcagctgacaaggagattcagccagagaaagccgtgccgcaggagtattgtgacacacgattgctgccgtttcctcaacgaagtaggaaaccgtcagtggacgagcaattcgctcattttgttgaagtaatccagaagatccacatcaacgtgccattgttggatgctatgcaagtgccaacatatgcccgctaccttaaggatatactcaacaacaagagactgctcccaacaacggaggtggttaagctgacggagcaatgcagcaacgtcatactccacaagctctcggaaaagaagaaggatccggggtgtcctacgatcacctactcgatcggggcatagcagttcggccaagctttatatgatcttggagcaagtgtcagcgtcatgccaaaggacgtctttgacaagctcaacttcacggtgttggcaccaacaccgatgcgcctacaactggctgactcgtcagtccgttacccggtgcggatagcggaggatgtgccggtcaagatacgggatttcttcatccctgttgacttcgtagtgctggacatggacacgggaaaggaaacagcacttatcttggggcgcccgttccttagcaccgcacgagccaacattgacgtgggaacgggaagtatccgtttccatatcaatgggaaggaggaaaagttttattttcagctaaggaccgaacaattctccatggtcagaataaagtacaggccaaacccgcaaaatattcaagtggtcgaagtggagccacccaagacggacagcctcgtaaagttcatgcagaatttcctggagaaggaaacaacaatgcccaggaaccgttattggaagacgccggtaaaagccagcacaccggccaagaagctagaacaatcggctcagaggaagctgtctttcgcaccaaaaccaaataaggtgtggaaggaaaagctaaagacatctactccattacctctggagaagggtgggaaatccacgaactgaactgcaaggaggtacggtcttgcacatcggacttcaaatgacacgaccttcgccaacaggtaaattggtatgtatccgcacatttgttttcaacaatttaaatttttgcatcatcacatgtttgaatttcaaaattgcatttagaattttagaattttgaggaaattttccaaatgaatttttcagagcaaaccaatacaaaattttcaatgaaaattcgttatgccacgaccacactgaccgttggaacccaatggccgaaagtggggccggttgggcccaccagggttcgtttggccgaaccggccaagcaacggtcgggttcggctgaaccggccaagcaacggtcggctgcctccctttttgaggtaacggctagtgggccccacaggtcagttttgaccgttgtgggtgcactacttaagccaaccggccaggagagggaaatccacccaatttcaacacattttcattcattctccaaagtttgctctcaaattcattcaaactttgatagtttccctcaaattcaaatacttagttgcatatatacaagttactttggtgaaactaactggtaggtgaaacttttgctattctaacccccgccgagttagtccgttcttgctccattgtgtataatgacactacttcagaaacggtttttctgtacgagggggcgtttagttccatgcgggcgagttgtgtcggcgcctggaaaaatcgccccccccggggcaggtcgacgagccgcatgtgaagatgcattatcgcatgcgactgcttaagacagccgcatgcgataataggcctattttctctctcctaaagcaagcaacaattagggggggaggttttcaactcgaaatttttgcttgaactctatacgaaaggtgaagaactctctctcctccttcatttggcttcatttttgttatatttcattggtggaaagtggagttttttttaatattttgacaaggtttgttctagctagtttttgcaaaatctagcttcaaaatattttttttgatgggcaaattttgcatgtaatcacttgtacatactacttgcattattgttgtaatttttttggagggacaaatgcatttaaacttttgtatgaaatacctgcggtctatttttttatctgtaacttttttgtttttatataaatagatggatcggtcgtcatggatgtatgagatgcggagaatgcagccggtatttattaaggaagcatctaaatttattgatcaggctaaggcgcatgctttgagggagaatatgacaaagatcttttgtccgtgccgtcattgcaagaatcagaaattgttggtagatcctgatgaaatattgggtcacataatggagtacggattcaccgccaactacaaggtttggacctatcacggggaattcgccgatcccgaagatgacaatgaagagttaagtttcgagatgaataaggcagagaattttataatcgaagacatgtcccgtgaaagaatggatgttgatgtttccaccgatagtgatgatttcgagggtggttttgatttagacgatatgctacgccatgttgaaccaaaggtgctagcgggcaggtcacgaggattggagaattggcaggcattagagaaggcatcgaaggatcttctttacgatgaaacgaagggatgtgataaggatttcacagtcttgcgttcagtgcttgaacttctgagattgaagactaaacatggatggttggacacaagttttaatgatctgatgagtttgttgcttgtgttgcttcctaagcctaactttgtaccatcaaacacgtatcaagcgaagaaactcatatgtcctttatctcttggtgtagaaaagattcatgcttgtaagaatcactgcatattataccgtaaagaatatgcaaacttggaaagttgcccaatgtgtggcacaagtcggtataaaatggggaatgggcccatagattcagagtgtaccgatccagattctgataagggtaagcgcggaaagattccctcaatggtgatgtggtacctaccaattaaggaccgccagaagcgtctgtactcaaacccgactgatgctgagttgatgagatggcatcaagagagccggaagatagatggtatgattcgacatcctgccgacgctcgccagtggaagaaatttgatgcaaaacacccagaatttgctaaggatcccaggaatgtaaggtttgcgttgagcattgacggaatgaactcgtttggtgacttaagcaactcgcacaacacatggccagtccttctcacaatgtataatcttccaacatggatatgccagaaacgaaagtacattcttctcactatcctcatacaaggtccaaaccaacctggaatcgacatagatattttccttgagcctttgatggaggacatggaggagctttcgaaagaggggttacgactatgggatgagtttaagcgggagcacttcaatctaggtgtgatcatattcgttaccatcaatgacctacctgtgaacttttcattatctgggtagattaaagggaagactggatgtctgatatgtttggagaaaacttcgtacaaatacctgacatcgtctttgaagacagtgtacatgcggcatcgacggttcctaccacaaagacacaggtaccgtaagatggctagattgttcgataatatagtggagaatgacactgccccagaagcacgaagtggtacatacgtgtatgagataacaaagaagattaaggttgtatatggaaagggaaagaagaagacagtaaagaggaagaaagctgatggtgacaaagatactgcattgcctttcaagaagcactcaattttcttcagatacttagattattggaaggacctagagattcgacatgcaattgatgttatgcacctcgagaagaacgtgtttgatagcaccattggcacattgctggacatcccgagtaagacgaaggatggattgaagtcacataacgaccttgtagatttggccatacggcatgaccttctcccagtagtgcttccaaatgggaagaccgagattcctcctgcttgttactcattgacacttgaagagaaaaaagccttctgtaaatgtttgcaaggggttagagtgcctactggtttcgcatcaaacatcaggaagctagtatcaatgaaggatttgaccatttctggatacaatgcgcatgactgccataggttgctaatggtattcctaccaattgctataagggcagtcaaaccagtccataccaaggtggttataacaaagttgtgctactttttcaatcgaatttcgcagaaggtatttgatcctctggaattaggtctccttcagacatttgctgtcgataccatatgacagcttgagatgtatttcccaccatcatatttagatatgatggagcatttgatcattcacatcgtccctcagattattgaacttagtcccttatacttatatcagatgtgggcctttgagcgttacatgtcgatcctcaaaggctatgtactcaatcgcgctcaccccgaaggatcaatgatagagggatacacaactgaagaggcggtcgagtgttgtatggattacataaaggatgctaatgccattgggattcctgttcatcgacacgaatggagattgtctggaaggggtacggttggtaggaagcagttcttcgataatgagtacaaaatggtgtccgcggcacacaacaatgttcttcaacagctcgctatcgatgagccattcattgagcgacaccttgaagaaatgaaagcatgcttcccagggtgatccaatgattgggtatcaagagagcacaagcgtcgctttcctctgtggttcaaagatctaaacctgccagttggtgattctgtggaggaacttactttacaaagactggcatgtgggccttcaagtattgtcaattcatggcaaggttatgacatcaatggatttaccttgtatacgactacgaaggacatgagaagcaccgcacaaaacagtgggatccgtgtcaaagcgattgacacgactggtgaaaagaagtcgtattacaggaccatataggaaatttgggaactggactatggcctgaacatccagatccctgtgctccgttgtgaatgggtcaaagacacaacaggggtttccgttgatgactacgggctaacgatagtcgatcacagtaaaacaggccacgaggatgatccatgggttttagcagagcgtgtggctcaagtgttttatgtgaaggacccttcggatgaaagaaaaactattgtcatatccggaaagcaacagatcgtcggcatcgacaacatcgaagaccccaatgattacaaccagttcgatgatgtaccattgtttactgatcttcctatgcgaattaagaaggttgagagaacaattgatgaagcgaatatgtcgtacgttcgagtagatggtgttgccaaggttattaagtcatagttattttgtaacctttagttgtcattgtgttccaaatgtatccggatgaatttaagtgccccttatgttgtacgcattagcatgtaacatttggtaatgagttttgagtaattttattaaatcacaagtccaacagatattattaaatctgtagttttctcatgagtttactcatgagttttcttgctgccaaaaatatatggaatttttgttgtaccaaaatatttgaaaaaatatgtatgtacagtttatttaaatgaaagaaaaaacatgagtttatttggtaaaaagatcttttcatgcgggcgatttaagccggccgcatggaaagatcattttcacatgcggccggcttaacgacccgcatggaaagatcattttcgcatgcggccagcttaaaggcccgcatggaaagatcatttttccatgtggccggcttaagccgcccgcatgcaatgatctgcgcctatatatagggagcgcggggagcgaaaattttctaagtcccggcgcccgcgaaccctagccgctaggctgccaaaatttcccccctcgccgtgtcaccgccgccaagtcctccccgccacagccggctcctccccaagacctccccctcgctgccaagtcctccgccggctcctccccgaagtcgtccccttcgatgtcgccgtcgccgccgccaggacctctccccggccggccccctcgcggtagctgccgccaagtcctccccgccaccgccggctcctccccgaagtcgtccccctcactgtcgccttcgccgccgccaggacctctccccggccggcgccctcgacgtcgctgccgccaagtcctccccgccaccgccggctcctccctgaagtcgtccccctcgccgtcaccttcgccgccgctaggacctctccccggccccctcgctgtcaccgccgccaagtcctccccgccaccgtcggctcctccccgaagtcgtccccctcgctgctgccaggacctctccctggccccctcgccgtcgccgccgccaagtcctccccgccaccgccggctcctccccaagtcctcccggcccctcgccagcgccaagtcctccccgccaccgctgcgccgactcctccggtcccaattcccctagtactatttcctttaaaaaaagaaatgtgaaatgtgcaattgtgcattgtggattgtttaattgtggattgtggattgtgaaatgtgcaattatggatagtggattgttgaattgggacttttgtgaaattgtgcaattgtggactttagtttaattgtgagatcgtttaaattacgacttatgttaaaaatgggacttatgttaaaattgggacttatgttacattgggatgaatgttaaattgggacttatggtaaaatgagacttgtgttaaaattgggacttatgttaaattgggatgaatgttatattggcacttatgttacattgggtctgatgtcaatctcggaattatgtcaaattgtgacttgtgtcaatctcggaattatgttaaattgtgacatgtgtcaatctcggacttatgttaaattgggatttatgttacattgggacttatgttaaaattggcaattatgttaaattgggatttatgtcaaattaggacttatgtcaaattatgataaattgggacttatgttaaaattgggacttatgtcaaatttttttacgtcaagttggaagatgtcgaacgataaggttccatcgaacgcgccaatagctcctcaagaaggtaacgctcctcaaaaatctggtagcaacaagcagcctgacgcttctagtgaagaaacatggcgcacaccaagtgacccgtttccaatggaaataacacaagtcgcccctcgcgatgatgatccgtactacatacctatggaacaggccgtaagtgttgaacatcgttagccatatattatttactaactatgatgtgacatgaacctaatggtgtagagagttacctatactgtgcagatggtagtccgacgccgctcgaaatgtaaagtcgcgaggaccaggagagaggaagaggtttagatggacactgctacgtctgcacttgaacgtacggatacatctataagtgcaggcgggagtgggaaaaaaagacgtggtgagagaagcaagaataaattacccaaggaaatttacaacgtgattgctctcgatcaggatgggaagcccgtcgagccaccgatagtgcggtccaagtttagcaacacctgtggcactctagtcaggacgcgttttcccattaatgtcaagttgtgggaaacggtggatgacaacatcaagacacttctttggaatgagttgcagaagtattttgtgtaccctcctggatcagaggtcagggggagagattacgcacttaaaaagatgggagatcgatggcgacagtggaagtccgatctaaatcggaattatgttcagaagaatctgccacctttcatagaatatggacatatatcgcaggctgactaggatacgtttgttaaagatcatacaacagatgaagcattggctttgaggaaaaaactgtcagacctcgcgaagaagaacaaatatccccatagattggggtcgagcggatacgctgggcacgtcgatcaatggcgggagaccgagcagagatttgcagcggccggcaaacctctgctagtagaccccatggtggaacgtagcaagaactgggtttgggcacgcaacacaggtcaagtctcggatgagggagacatactattcgagactccagacatagaacaagtgactactaatttgcagtagatagtcgagaaagaaagatgaggacagttcgtcccacggagggagcgagaccagcttactgcggtgttggggaccgccgaacactctggatgtgtaaggggtttgtcctcaaagacgagttggaagatagggtttccacaagacgcatcaagttataagaagagagacaaatacaaagaacaactatcagacaaaatctatgcgcaagtgaaggaacacttctactcgttggcagctgaaaacccgacaacctttccaaggttattccctgatggccaccaacccacacaattcgcacagcaaacaactaatgtacccagcagtgtaggctcagtggagacaactcccttccctatggatagtataactggacaacctacgtgcagtcccgtcgtacctatcggccgcgctggaaagactaaggaggttgcaacgggtttagcgatacccggacgtcaattccacaacacggcaatccctgaggattacgcaagggtacaggtcgccaaggtccatagcgaccacatttccttggaactagacatacctgcacctaaggggattgaacttctcggtgatgcagtgaatcagtttatcttgtggcaccgcagagacataatcctgaccgtggccgttccagcagcaggatcttcaactccatccccatcgcaagcaaggacagctgccgctcctgcaccaccatcgcctcctgaaccactgtcacctcaacatccggcgtccccgccaccgcttaggccatcgcctcgccaacctacaccaccaccctccccttctcaacagcctgctctcccggctccgcaaccagtttaagcctctcccacctccccagctaaacaacatgctcccccgactccgccctcagtgcaagcctctccacctacactccaatctgctctggtagaacaagtgcacataccagaaggtactacatccgaaccgaagtctaatcctttggaacctcatcgtataattccaaagttaatatcgacatatgacccaaaggagattgacaaggataaggagaagttcatgttttcagctttcaggaattctgagaagaggaaaaaacttgctcatgtcatgtcagactcccagaagtcagtactagcggcccaagatgaagtgcaatcctggttatctgccgatgtgcctgaaacttatgagtatggcaagccattcttgccaacttatcttatgaacaagctaccatgggaaatgagggtaattcacgaatggtatatcaaggcatctaggaagggtctcggtttcataagcgtcgccgtcccggaaggtgctttcatgagtggtcctaatgggatattttttatctctttccaagacctttacgccctctacaagctagataaaatggacgttaatctcgttgcggtgttctgtctgtaagtctgaactctatattacatgttacacgtatcattctaaacaaagaaaccaaatcccattacttctttgttcattgtgcagtatgcaattccacgaagctgatagaactggagcaaaggttggatacgtcgatccaacaagaatatgcaaaacacaacacatcgtagagctgagagaggactgcgagcaattggttggcaagacccctaaagaaaaggaagaatatgtgaagacattgcacaagaggaagaagctagaagtagcaacatacttggcaatagcaatgttggcgcacgccgacaaagatgacttaatggtcccctacgcgttcacgtaagctctctcttctttttgtttaattaatttatcttcttcggaattttctatctccaataagcctatcttatatgcagagaccactacatattattccttgtatatccaaaagaccaattgatcatatcattggaccccgcacactatgacaaggaaacatttatggaattcctcactattttgaatttgtaagtgataaacatttcattaatataaattgtttaggtcgaaccccagtcttctaactactgataaaacaattgttttcttcaaacagagcacataagtactaccgcaaaagaggtggaccagtacatattacatcccagaagcagttatctgtcaggactggctggctggtactatcaaatctataccgatacaactaattattgaacaatacatatatactaaattatatctactgagatcggtccctcataattatatcgcagtgctacaaacaaccaccgggaaccaacttgtgcggttattacgtgtgcaagatgctcagagtaaatgggaggtacaaaacaaccagtaaccgagtaagtcggtgaactcttctctacaaagaaacccatctagcacacacttctcactgagtaccattttattttcctttatgtgtgcagatccccaaaatcccatatattgcacaacaattcaatgacaatactatcttgaacatggccgctgacctctgtcgattcatccatcgcgatgtctgcaacgcaagaggtctcttctacgacaaccagagtgaactcgcaatggacgacaaatttaaacctctcagagagtaggagaaagaacatatgcaatgacatgtacactacttatacatatgatgaaaaaactgtggcacttgtattatatatttcgtatgtaaattacgattgaatttatggttatgtattacatgtttgttactgtgccacttgtcttatctcatatgcttactattccgaaatacgataataaatccttcaataatttaatattaatgacgaaacacatctcaccaaaggctagaataaatattatttgagctattcggaaattgaatttcgcatgcggtctacttaagacggccgcatgtgaaaatagattttcgcatgtagtcttgttaagtcaaccgcatgggggaaatatatcttcgcatgcgacttcttaaatggaccgcatgcgaagatctattttcgcatgcggttgtcttaagtgagcagctgggccggccgcatgcgcaaatggtgatctttgcagaccatttcgcgtatgcgggctggccaaccgcatgtgaagatcgattccgcccgtatgcaaaaacgctttctgtagcagtgtgaggaggcgactatctcgtctgttcaagggatccggctcttcatcaagccatcatgacgagtctagcgctcattcatcagctgatgtctcgatataggatgccgaagttccgcgatgtctcctgaacgacgccgacctcgaccttgtcgacgatcaagaaagacaagcctactacatgctgagtgaccgggagtatgctcacacgcgagagtactctccggagctgctgaaaaacataggtatggatgttgattttcgtgctatttagaaagccgttggttggcagatatttgctgtggtagatgagcctagttctcgtttgcttactttgcaatttctgtgcactttgaaagaaatagaagatggaatttcctttcgctttttccataaggaatacacacttacgtggaaaggattaagtacacttcttggttttcacgattcctataaaatcgatctccagaaaggaatttccgggttcgagaaaaataagttttgggaagatatttctggtgctccaatttgcaagaaaccaaggacgaatgatatccataatcctacacttaggctcatgcacaaatggattgctatgactttgtttactagaggtgatcttagacccattaggggggatgaatttattatcatgtttgccatggttagaaaaatcaaaattgctcctgtgaaatgtatgataagacaatggttagaaagtataaggttttctgctccagttgagtgcacttctccgattactcggatagcaaaagggctaggggtcgttaatgaccatattgcttttatctcagccgctcgtccgtgtattgatgaaaattatctagtgcaaggccatattcttaaacatggagtagatggatctttgatttactttttccctggttgtacaaatgaaatctcgttgccaaacgtagggtaacatttgtacaactgtcgtgaactaaccattcccctgcagaccatagaaaaatctcatgcaggtggagtatacaggggtacgcgcaacatggcaaggaatgaacgggaaagttcatcatcctcaacacctgtgcaaatgtatgaggcaggttgggaaccaactggggatgcgcccggatagacccaagctccacgccacagcatcggagtctcaagctgggcaagtgccagtgaaaaccggtggcgtgcacctcatgacatacattaggggggcaatcaaccccccagatcaagtggtatgcctccatctccaagtgaatggcgctcaagtttctctcgttgggacttgggtgaaatcactaggagaatggacacccttgatgtgcagacgggggagatccagtacaacctcacggaacatatagcccagatgcaagaatggcaacaaactgttgatgctcagtttgccaacatcaacaacatgatgcagcaacagcacgatgaccttcaagcgtacttccgctttcaggggttcaatccttatcaaggacccttaacgaaagtcaagcttggggggagacatctctcctcccactaaggtaacttgtatcacattgcatatttccctttccaattgcatatgtgctttccaattgcatcttataaacctaaaaacaacataaaaatttacaaaatagaaaataccaaaaagataggataggtttgagtcatgctaggtaagacaaactagttctctttgttgaaatgatgaatagttgctctgttttatatctcttatgtatgggttcataggtaagtgatctctcaaaggttaaatataagtagccaacaattatctgggaacctgaggtaatgagctgcacttgctgatctaagtctaggttgttgcaagatataagatagtaaataagagctgctatgatcctgatcctactttgacttgaattctggatgatttgtttttcaaaatgataaaattgaaagttcctcatttgatataaattcctaccagagccaaaaatatgccatcatgattgaatcatatacatttttggttacttgtcattccattgaactttgtcaaatccttgtgacttgtgtagatacttctcatgctctatgattaagatcatacactcacatttatgcacatgctaaactcctacactgggtgctagcaatattccattccattttccatattaccaccaaaataaattcgccatgctttcatgtgatttcttctgctaaagtggaaatcctttcgaaaaaaaggggagggaaaagcatggttataaaaaaaagaaagagagataataaagttatgctctatcaagcatgagcatgatattgaaaaaaaaaagaatgtgtgtagccatgccctctcctaaaataataaaagaaggatttttgggagaaggaagtaagcacaaaggagaagtattttctttattttctttatataccatttccaccatatatcacacatacacactgtacgatcttgatcttgatcacacatacacactgcatgatcttgatcttgagtatgtttagttatctgcttttgtctaagtttttgacttagtaataaatgtggatgcaagtatgccatgtttgatccctaccaagctctacatatcaaaccttaaagtaggaatcaaaaaggcaaaaatggtgaggaattcaagttaatacacttagagagactgagtgaatcatttgaggaacttggctttcttttgcaaaatcatttgaaaacttccggaataaaagttgaacaaatattgggtgattggtgttctaattgttgttctgtctttcaaccgcccaaggcaaggagaagcagtgtctcgtggcaatcagggataaggataagccaccgtgccaaagattttttaatctggagagagtacatataccttgcacctgtacctttgagatatacagcatggtagcaactcctgatcaacaaccaagtttatgtgtcctttcgtccttcactcgggacgagctaaggttcaagcttggggggttttgttgacggtcgttaacgatcagttttgactgtcaaaattaccgaaatataggagaactagttatgcttacaatgcatatacatgtcagaataataatattccacaagtattaggtttactaaccttttgtagagaataatcataaagtgaaggaaaatcgacatcaactcaaacgataaatcaatcggacgatgtcaaggattagacttatgcatgaatgggccaagaactcagaattgacacgatgaattgggccaaaattcacaagtctacgaaagagagcaatggaggagaccacctgccgtttttgggccaggttgggccgacccatggttcggccgaaccccccgcagcgccgtttgatccaggtttctcctggatggctgagatggctccccaatgacggttggtgggtattaccgacctttccaaccgtcacaaccgtcattgggaggctataaaaggagctctcatcctcacttcactcacacacctcaagcaagagctctctcgtattctttcaagttagtttagtattcttaagctagtggaataggaatagagtagaaatcgcgagtccgaaagccttcggaagagttcaggtatggctctagtagctttcctttcctcttttgtaacctttgtactttatttagaatactcttctatatacatttatggtattgaaatacttcccgagtatatgaattcctactttacattatgttcatgttatactgaatatactgctagcttatctaggagatgctttggtgcgggtataatgtttgcatatgcaattactctatgtcatgacgatgatattagaatagtatctggtagtttaggcgtggtgtctagataacgggatatcattatttggggttatatgctgcgaatgagaggtaggccgctgatggtgacagctcagtacgggtattcctccgcatgtgtatatagtcctaagttaatttcctgggagggtatgatgagggaatgttaggttccgatcttccgataggtattgataaacaattgatttgggcggagtcgcgacacaactcgatccggcttctgaacgaacacgctactgagccccgcaatcgcagcaccacgtctcctctagttatcaaccgtgccgaaacccggttgacctcgccgagaaggctaatccctgcatgcgaatcgaagaacacaagcaataacaagatagattgcaaccaaattgcatatgaatgattaagcacacgaatttggggttccacaaaccgatctagcggcgaaactgttcttgacagaataatctaagcaaaacccaactctagacgttgacggctacttaaaaaatgtgattaggacatcctagggttgccctagggcgcacacccccttgggctaagcccacaacacaattataaggcccaaaacccaaatcaaattcggactggataagatacgtggcttgttttgcagattctcggcagctcaataggaattttaacgtgggaccaaaaccatctgaaagtgattttgctatagatttgtcgtgtgattttttctctcatatttgtcattttttaggccattcgatgtgtgctaagattcgtgcgcatatattgggctgggaagtgcgaacccgcataggattctgttgggccgcgtgtaccaacgtctatcggtcagagtcgctttttttacgctctgaaaaattgacatgcgtgttgttctctctccttctctctcgttgaaaccaaaatacaaaattacaatcctatataactaaaactacatttgtaaatttagttgatatgacatgtaagtgcactgtaatttttataacaatcatgtgtaagtaaaaatgtatttgtattttctctaaaatgtaaaattacaatcatatataactaaaattacatttgtaaatttagttgatatgacatgtaaatgcactgtaattttgataacaatgatatgtaagtaaatatgtatttgtattttctctaaaatgtaaaattacagtcatatataactaaaattacatttgtaaatttagttgatatgacatataagtgcactgtagttttgataacaatgatatgtaagtaaatatgtatttgttattttctttaaattgtaaaattacagtcctatataactaaaattatatttgtaaattcagttgatatggcatgtaagtgcattgtaattttgataacaatgatgtgtaagtaaatatgtattttttttattttctttttgtagttcgttggatgtaaatctaagggtagaaaaaatttgggtgatttcttgttaaaaatcacccgacaaatggatagtcagtcccatctgaaagtagactccacaagctttccaacaagtattcatgggccctgaaattccttctagatcagcggctaggtccgtttgaaattgatgctgtcaggaggcccgaatccgaatccaaaacgtgcacaacttaatctcttgtcttctatgggccaaaagtgacatggtgagatgaaagaagacttggagaaggtcttggtttggtccccaatcaacttcttcaatcatccatgcattccttacgctcggtctcttttctttcgcccaagcaagtacctctgcaaacgaaaacacacaaaactcattgtgtagcaatgtttgttcaaaatataacaagtaaatctaatatagaacatatgcacctttggttgattaatacataaagtagccatggttatatccgagctagttgtgttctcatcatcctccccttcttgattggaaaccgtcctcggtttcaccttgtcatggagcgtattgaacttatctttatctatcacatccggtgaggaacatttcttgatggtcatatgattggatcctgaaatctttgtagtcgaaaaaccactacactccccttcttgcaaaccaacctgtaactcatttaaacaactagagaaactagatagagaataacttatacgcatgtggtgctctagacaatacatttcatcatgaaaaggaggtatggtcaaatttgaacaaatatatactcgatgcacattatattcttctttactatcataattgccaataacatgaaaaatcacatcagaagggcatggcaattcaaatctagcaaataatttcttctctaaacagttgagtggacaaagatcatcaaattgaatatatccccaagtatttaaagaagatagcaatttaagctcttcattctcgctagcaatgtgaataacatgtttaaactcaacacataatggctctactataaaactatcatgttcattcactagttgtggcacggatataagtgaagcatctcacaactcttctttatcacaagaaacatcaagcaaattgttttgtgataaaggtatttcaacaattgtttccactatgggttgctctaacgtagcataagtagtggacatagttggcatatcataaatatgcataccttgagtagctgtagcaccattatcattacctttttttctcatcttcagaaattatcggcgcttggtcaatagaacattcttcaagcatgcatggagctatagataagtcttttttctcttcgtctttcttctccttctcattaccttggttattcttagatgcctgcaaaatattagtatccaaaacaataggcacgacattacgttcattttgtaataacttagacttagttgaaggtatcacaatagtatctttactggtatctctgaaagtctcatcaattctattttttgtcctttcaatactatctttgaaaatttcctcgattccattcttcatcctttcaagattatcttcgaaaatttcagtaaaactcatgggtaccaatttcattttccgaccattatgtctaaatgtgtatgtattagcaacaaaattatgtgatccattattattatatacccatggttgaccaaacaacaaagaacatgcttgcatagggacaagatcaaaattggcagtatcatggtaattcccaatcgaaaagtttattctcacaattctatttaccttgaacttaccacaagagttgaaccatttgatgtaatatggatgaggatgcggttgtgtaagcaactcaagtttctcaaccaaatctgaactcacaaagttattgcaactctcactatcgattatagtacgacatgctctatccttaaccataaactttgtttcaaataattcgtgatactgccattgctccgctttctccatttgagaacttagcacttgttgcacccaagtactttcatcacgtgcaccttgttggtatcgctgattttgagcgccactcatacctgtcattgcaaacacaaaaccaataacaaacaatgaaggttatccctaataatctgctatgcggtgtagtggtgcccctcaataactcagccaaatggagcaccttaccaagctcttacaagtgtcttaccagcaatgctaaggacggtacaaccggtggctggttcgtgacaccttgaaggacgtgatatggcgattgcaaggatcaaagcggtgctgaccagaagtatatatgtgtagcttgggaggcacaatatatagtagcaaaagaacgtaattgtgctaattagaaaatgcaaagttgaataatagttcaaagtactagtcaatgtgctggcctagactagactcaactctagctcaagcaagcacccggcaccaccactaaagactagatatgaatcaatgcacaactctgcactctgataacatactcaaaggatgaatgattttttttctttcttggtgcaactttttttaagcacctttctgcctttttttttctttttttaggtgcggcttttttttacttttttcttcaacaaaaacggaccactgacctcgaacagggactcaaatgtaaatatgaatattacaagaactcaaacacaaagtgcaaaactaaaattggatcatctcaaaaatggattactcatatcatgtaggttccgtttttataaaaatatctcaaatccgctacttaacaattctataaatagggaaatacggatagtcacggatagatttgatctgatacggagtctctcctcatgcgcacacagtactcccctcacgcgcacagtacacgcacacagtatggcaactccaaaaccgtttgataaaattttctccaaatcacaaaaatggaaactcgacgacgagacgattcaatttttcaaggtcctggcaacaactgacgagatgaaaaactagacccaaaactgacatacaactcacacacttgagtgatgtaccctagacctaagtgatgaacagatgcaatactcaaaactaaaaattaaatctaagactaaaccagcactcgacacgacgatgcaacctagaatttaacaaagtaaaatctaatagaacaatgcaacggctcaaattgtctaggtaaagaataaatatttttgtgtggcaattttctggttatgggaaacgggcaaccgcgctctgatacaaactgatgagggaatgttaggtcctaatcttctgataggtattgataaacaatcgatttgggcagagtcgcgacataactcgatccggcttctgaacgaacacattactgagctccgcaatcgcagcaccacgtctcctctagttatcaaccgtgccgaaacccggttgacctcgctgagaaggctaatccttgcatgagaatctaagaacacaagcaagaacaagatagattgcaaccaaattgcatatgaataattaagtacacgaatggggttccacaaaccgatctagcggcgaaacagttcttgacagaataatctaagcaaaacccaactctaaacgttgacggctactgaataaatgtgattagggacgtcctagggttgccctaaggcgcacacccccttaggctaagcccacgacacaattataaggcccaaaactcaaatcagatttggactggatgagatacgtggcttgttttgcagattctcggcagctcagtaggaattttaatgtgggaccaaaaccatctgaaagtagactccataagctttctaacaagtattcatggaccccgaaattccttctagatcagcggttaggtccatttgaagttaatgctgtcaggaggcccgaatccgaatccaaaactcgcacaacttaatctcttgtcttctatgggccaaaagtgacgtggtgagatgaaagaagacttggagaaggtctttgtttggttcccaatcaacttcttcaataatccatgcattccttatgctcggtctcttttctttcgcccaagcaagtacctctgcaaacgaaaacacacaaaactcatcgtgtagcaatgtttgttcaaatatataacaagtaaatctaatatagaacatatgcacctttggttgattaatacataaagtagccatggttatatccgagctagttgtgttctcatcagggtactcctccgtatttagatccggttgtatggtcatgacgggctgtcgtaaggaactcggtagtcagaggtggcttctcaaagtaccaggagggcatcggataaagggtattagctagtatttcatatgactagaatgtatatatactatgtatactagaagtataggaatagattatctttctcttttctttccacttagcttagataatttagtatgagaatgagtagctcaactgcttgtgtgtcactctacccttggattatcttaaccagtgcttagactatgattatcacaagtaatatataaattattaattaagttctctctacatgatcttcccacggaataaaataaatataatacccttggaatactctcgggtgaaatgctacaatggtatatccgtgcgcttgcggatgaattctataaccataatatacccgagcatttctgcgtcattgctgggaattatattcttagtaatgtcgttaagaaataccgacagcggtatcatccaagtgctaaaaggatgttggatcaaagccgaaattagtgtccgagttcaaagctaaagattgcaaacacctgtttcgacagatctggctcagccgccttgttctcccctttgccggaccttgcaatggtggtcgtccccgtgcagcaactccagtgtgctcatggcctacttgctggtcaaccttctcatctattggaattgtgttgctctcacggagacaactgtcacgcccagaaatttagcctaaattttcagactattttatttattaaatccctgtccagtaccagccagggtacacaaaacgacaaattaatatacagatccaaacgtaaataaagcataaaatatttacagaagaggcgcttggtcctcacaccgaaaagaaagtagcagcagcggaaaaaggcgatcctaccagggcttcagctccactccacaggcaaaactcaactggggtctgagccttggtcccctaacttcgtcttcagctcagaagcactacacatctgaaaagggagaaaatagcaaggctgagtacaaccaccgtactcagcaagccacaccaatgatgcagacgtgcaaggggaacacacggacggtttgtggctatttgcataaaggcggttgcaaagcattttattgagcaaaacaataaaatatttggttgattaaggtaacattaaatctccactgatcaacgctacaccacgttgaacaggcccaaccaacccacctgaattaaccagttcattaaccaattattaaggatgggactaatcacggtgaatctagtcgatcgcccataaccgcgggcacggctatatgaatagttttactctgggcagaggtgcacaactgtacccacaagacacaatccaccagcatgtcaccgtacctgcgcagacatgtcaccatgtcgagtgattgtgacaagacccttcatataactctcccctaaccatccacaccacgcaaaggtttcacccccaccccctaccccaaaggtgggcagacccctcgtgcgtcgcgatgaatccgacagctggacaaccggacacccggccgacccaactccatcacgcccaccctcgccactagtgtctaggaaagggtcgagttatactacaaatcaagcagttacccactcccgcttgtggtaagcactgtaagtcttccagggtttcccgtgaaccagtccttaattgctatgggtgcgaccagcaaaaaccatgcacccacagcccaccattcagtcacattttagttggataattacgaccaatgaatatttgcatgagacccacccaggttcatgaaaaaaggcccccaaatatccatcatctaactctccgccaccgtacacgaaaaaaaataacatatgtaatttggatttcctgtcgcaacgcacgagcatctttgatattcttaaaagaaagataaacgagagagatgaaaggaaaaggttcacttgaggtccctagtcatcgagtttcaaaattgtccctgaactgaaataccaaatataacatatccctaatcttgcaaaaccaggtcacattaggtcccaaggcactattgctccccagttttggtgatgtggtggctgagtcagcgtggggcccatgtggggtcccgcatgtcaaccgataatcttcgcccacctatctcccctttcttcccatctcaacccagacctctagggcagccggcaacaggtggggagaagagtggcgactgacgactgcgtcatggacctacacggcgaagagcgcgaagaagcgaagtaggaagggctcccgacatgttgtccccttgggttacactgctacatcgttgcatagcagttcgtcgcgcatctgcaccgcgtccgtatcatggtcgtatgcagccacaccgtcaagattggcgagaggatctccaagagttgggagatggagtatgttgcgacgcctgagcatagttgcgagcaccactgactccatgagtgtccgtgcatgcacgcgaagaggatgccagacgctgaatcacgggagaagtgtgtggtggccggtgaccagtagggagaagggtggcggttgttaggcggcaacggtaggtagaagcccgacgacgacgcctggcgatgagtggggagaaggctggcagccaacaagaagcttggcggtggcgagcggtgagaagggcgcatgcgttggggacgatgcaaccgcaatatggtgtagatggagttgacctcgaagacgatgcggtggaaccgcgcgtgcgcctctgcgaatgagaggcagagctcggggacacctgaacacatcggcttttgagcaactcgacgaggggtgggggagtatgagcttgggggataggagcttggccagcgtgacgaggcagaagccccatccttcgcgcgtgcaggtgaagacgacattgcaattgtagttgggacctgcaccgcactccccgcgtgcgcaagtccatgatgtgagcgctcccggctattgggagccacgtcagccggtggcctccgccatcgagcttttccccgccgaccgacacccttcttctcacccattgacggatgccctggaggtttgggttgagatgggagtagaggggagtgaggtggaagaagattgccggttgacttgtaggatctatgtgggactcagccgccatgtcaataaaaccgaaaagatactaccttgggatcaaaagtgacctggttttacaatattagagggttcaggaccgtttaaaactcaatgacaagataagggaccttagatgaacttttttgggagatgaaaacattccagcctgtgcgtatgagtatacggcagcaaaccgctgcacgacctccgcggctccgcctccccaatccgtcccgtctcctcgcctgccgctggcatcctgctagcagaggtggcgccagcgttctcctgctcccgccgcattcgctcgccggtgagcatcctaatccatcccatccggcctcggcctcgagtttcttctcctcgcctgccgcttgcgccgatccccatcctgcgaggagaggtggcgcccggcgtcctcctgcttccaccgcatcgtcactcgccggtgagcatccctctctacccacacctcaacagtttttcctgttccacccttcttcctccagttcttccccaatccctcgctccgtcgctcacaacccgtctcctgctcgatccgagcgcctcacgagagagagagagagagagagagagagagagaggagaaccgcaggcgatggctgcagcttgctccttccgctccgtcgcccgagctccgccgcccctgcggggtctcgccaggagaggggttgtgcactgctgcagcaccgctcctcccagcggcggcacctccacctcctcctccaaggtgccagcaaccccccgtatgttctggatgcgtagataggatagagacgtagatcgtgacttgcttgcttgtatttgcttctatccatgtgctgtgaagctcgtcttggaggtcaaagaacggctggagagggagcatccgggcctcccgacgggcaggaacgggagggatgatgaggagatgatcctctggttcttgaaggacaggaagctctccgtcgatgaaacagtttctaaactgaccaaggccattgtatcctacaaactgtgctgacatgagaaatatgacattcatttcctgttacgataaatgctcttgttttagcctattgtttcgttcataattttctttatgaaacctagattgttctgttctatagtgcctctataatgaatgtttttcttaaaatcacaatccatgtaaggtattgaaaaagcataatagagccagatatttctaagttcaatagtgccgcttacttttacactttaccgcaagaatttttaatacataatgtgctatttggatacattcgctgatgggaatattgagttctggtggaaactggaatttaagtgattcagtcaaactagtgccatattctcttttctaaacttgcatatgcttaactgtacagtgtttcatatacgtcttccaattcttttacaagttgtatctcattttctgggagaaggcattacatgcttgaaccttaattgctaagaactacacttgttcctattcacagagttgacctaaaatcacacccccttggtaaagctctatgttatattatctacattatcctatttgttaatgagtgttccttacatccacattagaaatggcgccaggattttcaagtctcagaattatcagaagaatcggttaaagggttgtatcaaactggcaaagcatatgtgcatgattcttttgacatctatggtagacctgtgctagtagtggtggcgtcaaagcatttcccttctgtaagttctttatgttgttaaccatgatttagacatgttgaacttttgatgtttcttagcctaaatagtgggtacaggcattctcaaagcattagaacagcacatggaacaaagtagaagtgtagaactacagaattatttgtggcatatcattagaacttagagtgtctgagagcaactaaaaacatgatttacatatttacacaacacagcttcattttgactttgtactctgatttctgtttagtgtctatctttctgataatctcagttatgttactggtccacacaattacagaaacaagatccagttgaaaatgagaagttgtgtgcctttttagttgagaaggcattgagtagacttcccttgggaacagagaatatacttggcatttttgatcttcgaggatttcaggtggaaaatggtgatctccagtttttgaagtttttggtaagttgtgttcattcattctatgctattcccaactacgtagttgtccctcagaagctactaaccaagcatttcagattaattgctaagtcattggagggttgaacatgcatacaattatcactggtgaaagtgcatgtaggcccctaattgttttgatgattaatgacaatacgattagagaggactagcaattttatttaagtgaatgtgaaggattgttagtctatgacgatttgtagcgcaatgcatatctcaacgaatgcgacaaaatcatgagttgctgcaatgagcaaaaggtgatcttgtttatttttatttctttgggtcactaggaaagccgtactattaagagagatgatgcattgacgtatgaggagtgatgtatgtgctcaaaatctatttttaaaagggtttctcctcagtttctgtgttctgggaatttttggagttgtctgaaacagatttttggagtttccgaaaatagacataactgaatttcgcttctggaaattttcggagttgtccgaaattgatttttggaatttccgtaaatgactgagaagccaaaatcgattatgtaaattttcggacccgttcgaaactacttttcggaattcccgaaaatgacagtgaaggcaaaatgtttctgtaaatttttgaagctgtccgaaatccatttttggaatttccgaaaatgtctgcgcaccaaaaaacgtttctggaaattttcggacgtgtttgaaagtaattttgagccttgctttcttgtttcccctttccacccgtgtttgacttggatttggtgtgtgtgagagagagttgtggattcgagtttgtgtgagtgcttgttggcttcgtgaagatttgtgagcacttgcatcgtctccgggagttcattgcatcatttgttactctcggaggttgaggactcctaggtggctaggtgtcactctcgagccaccaatgtacgtgtggttggccaggagaagtttgtgaaggtcggatctcacctccgaaagggaagagatatcactagtggaaggagtgctttgtgcaatctcttgaggaaaggtttagcgaagacccggctctttgtgagctcctcaatggatagtagaatcccctaaaggattcgaactcgaggaacaactcattgtgcagcatcctcactcctctagctttgcttgtttgtgctgctataggtctagttgttgtttgtgctagtattttcctgttgtaggcagctagatctagaatttactttgaattacgcatactctgtcattttcggaaattccgaaaattcctactcccgcgtttacttgagtttttgaattagcctattcaccccccccccccccctctaggcctaattgactctttcaaccggtttgcctttgtttatcaaagataaaaaaaaagttactttcattaaataccagtttgtaatagtataagaatgctaactaacatcattactaaacaagaattgcctgctctatgttatgggcatgggccaagcccatgcagcagattaggcatgatatgttaggagtaagtcatgatatattatctagttagaaaagatatgaggtttataagaaagttagagccgtagatattggattggtttctaaaatactagagattagttccttcgatgtcaaatctgtccttatatataaagggaccccatgtactttattaccaatcaatcaatgaaaatctaaagttagcctaaagttagccctaagcctcagaacttcttttagtttagtagggagaaaattatagtaacattttcaatacaaaacaaacaaactatcaaaatatattcaatgcttgatgtaaggaaactaatttgatactataagtgttgttatatttttctataaacttggccgaacttttaagaagtttgacttaaaaaaagtcaaagcaacttataatatgaaacggagggagtactaaaaacagaccatgtcctgtatatattctacgatcataagtttgtactattatgttagttgaaccattgaaacttgctggcttccacgcttgatgcatattttccacaaaccattttgttttctgtactcctgtttaccctacttccctaactttgttcagattgatgtgttctactattactacccaaagcggctcgggcaagttctttttgttgatgcaccgtttgtgtttcagccgatgtggcagcttgttaaacctttgttgaaacaatatgcatcactggtcagcttccctctctacccctctgcatagaagttatttagcaaatggcacttaatcttaccccttcactgttgttattcctgcacataaggtgagattttgtgatgtcgagacagtgagaaaagaatacttcacaaaagagactgtacctcctgatttccgcaattaggtgccatgaactgtttatcatctctgtcaccactgggttgttgctccgaagagaccgttgaagtacctagtgacaggtcagtgctgattctcattgttttgtctttggatatcagcttattttctttagtgggaacctagctcttctaatcacgagtagggatttattctgtcctaaaaattgaatggcagatattttaatgcaactgaacttgctgctttgaatttttgtgttttttctacttgctaggagagctccaaaccatcgagactgagctaaattgtattgacatgatttttggacttcaatcttgacagtcaggaccatctcgaaatcattagctagttgctcaagaatgtcttgggtgctgtcgttcctggatggacgaagaaagccccctgcagttgctcgaaaaggctttaaagaatgtatccccatcatctgttgctgtttcctttagtatttaaactgtaataggagtatgtaacttgactaaacagtaacaaaattttatgagttccaaacaaaaacaaaaggaaaataatacagttttatcctaaagtatattacatgtgcactctattcacaaggttccaacttaaatttgtccctgcatcagttaccacatgcactaaaacacttgtgattaccttcatttttccacaattacactggtaggtacatttccacaattacaccagtaagtacatttcttggaaaccaatctagtaacccaagcaatgacaccacagcacattaacccacctccaccactcaagttaaggcaccccaaccaaccctaccgagaagatttggttactccaatctcaagaaaactactactcctactccgtaaaccaccagtccttgccaaaatcatcgccattttgccaagctgggcatgcttcacatgcacgcgccgggcggcgcgcgcaggacgccaaacggtgaaacgtaaatacacgcatcgatcgatccaggccgcgcgctcaatgactccgcaagcggcaagcgggcgcaaggagtgtgcggcactctcggcgtcgcggtcacgggcggcctgtgcgcgcattggctcattcttggcgccacccgccttaagaaagctcaccaccaccaccacgtactacaagctgctacaccgctacctagctaatctagctgtctcgccgtcctgatccatcctcgattcattggcgttggcgtttgctcgaactcgagcacgagcgagctagctgctaatggggatctgtatgtcatccgtggccgtgtggaaggagaaggtcgtctacgcggggcggcggcgcggcgaggttgccggcgcggaggacgtgggaggcgttggcgctggcggcgggtgtggtggcccgtacgggctactgggagtcgacgctgacgccgacgtgctggagatcgaggaggaagcggcggagaaggtggtgaagtgcggggcggaggcggaggcggctttgacggtggcggcgggtggcacgccggcacggccgatatggcagaggaaggtgctgatgggcgtcaagtgccagctgccgcggttcagcgggatgatactgtacgacgagcgtggccgaccggtgtgcagcggcgtccgggacagggcgcgcgacaaggtgagtgagccatatcatctctcgcgcgctaattaattaaactgggcctgcgctttttgccttttgcacgaagtggcatatgtgttctcgatcaaatgctgcatgcgtaactaatggcgcgcgcgcggctcgttgatgtcaatctctgcaggaaaagcacgcggcggcgatcatggtgctgagggacatgctctagcctcttggcccctagctcgccggccggccggccggccactcgccgtccccggtggcgatagatcttcttcatccctctgctttcctgtttcagttaaccggtcgatatgtgtgtacatctttttgtttcatgggttgtccatttggccgactacgtcgtctgtctcagtagtgatcagtagctactagccaggagcccaggagtatgtatcggggaggtagtgaggcaccgagaggcaataaaagggttgtctatgcatattggttgttgggagtgttcttggcatcctgcatcctgcttgtgcaaacctattgtgattgactacagtgttgatagtcaggtgttgttttgccagcttggagaatatgcatgataggagcatggctcgcgcgctgccaaaaatctcaattcgatactacgtgagaacgtgacaaaacaaattattatttattagattgtatggaagacgcacacgcacctcagcagtatatacacatgacacacagcggctgagcggcatactaccacacacataccacacttacaagtgcgtctcaatggctcaagagagacccaatattaaatctatatatgaactaactaaatccctattaaagatacatctacatgtgtataaatgtgtgctaaactcagaaggatggtcgtgtacccagtatccagcagcggagtgccagagccacgtgaagggtagcttgggcttgagccaacactaaacttcagataaactacatgattgagccctactcctgataacttaccacctccgcccttgctagtatccgcatacatgcaggggcggagccatcgcctggtctcgccagcgaaaactcaattaaattttaataatgatgagtaaattgatgatgaaatttctatagcaaattctaattatattaaagtttactcgggttcaaaaatctttctggctctgcccgcccgggttcatcagcaactccattaaattttaatattgatgagtaaattgataataaaatttccatagcaaatactagttatatttaagttttactggtttcacaaaattactaagcgtactcgcacatgctatatttataagtattaggatttaaaccctaataggtagagttctacacatacaactccactacaataccataaccattatagtgttgttggttaattgtgatagtgattttataaaagtttcttttataaaataactttgatcccgcccttggatttgcaaatgcatctattgtttttagataaaatatggtagggtcttatgtaaacacaagtaatacaccttatatcttttatagaacactagaaaaatacccgtacgttgcaatgggctctaattatattagatgagttgactaaaactaaaccatcactctcacactctgactaatgatgatatgatatgttatacagtgtacatgaagcaaatagatattctcagtctagtacattgttggttaataatgatggacccaaaagatagatggtggcccccacttgtcagctaggtgggtatgtagaatcaaggaagccgactaaagggttttaaaacttttggctaaaaccggcttttgtatgcggaagcgtaaatcaaaacggttttgcacaattcaaaacctaaatcaactagtctcaagtaagtgcacaaagaagctagcctatgttaaggtttgcaagcctagggtggaaatagcacaaataagctctagtatgtaaacttgctcaaatgtaaatgcaacaaataaatgagataagagacaagggatttttcaccgaggttcggaaactcgtcggtttcctaatccccgttgaggcaagctcaactccaccgctcaaccacgaagctaccgcacgcccccttcgtcaaggggtgggcaaggtgggagccggcccatggagaggactacccaagcctcgatcactagggtagttcttccttcactccgaaggtggtgaactccaaaccaactcacaatcagcatcgggcctcctccacaatctcctcagagaggtcaccaggcaacacctccacaagccgtctaggaggcggcaacctccaagagtaacaagtctaggatgcttgccgaggatgatcaagtgccacactagctataacaatgaagcaatgcacttggattggcttaactcactctctaacaccttactagataaactaagtgcacaagggtgtgagagctcttgcaagggtttaagataatgcaatggagtgccaaaaccttacccttgctgctggggagtggatatatatacccccaaccaccaaaactagccattggagtcgaaatccccaactctgtgctctgccggtcagaccgccatagagtggacagtcagaccggactactttgtaacggctagaaaactagccgttacagggtaatcactgagcccactcaacctggccggtctaaccgcagtgtagtggccggtcagaccgtccatggctcggtcagaccgccatcggctcggtctgaccggttgcggctctggcggctctgtatcgccaccaaacaccagaccagtgcaaatagaccagtagggccggtcagaccggccttaccacgccggtcagaccggctaacagccccggtcagaccgacctaaggcccacggtcacaccgcaggtcacttttcaacacaaccaaccgttagtaaaacggcgatatctcttgacttggatctcggaatttggcgttcttggactctatggaaagcttattcaaagggctatccaacccatgaataattcatccaagaaacacaacttaattcagggagaaagggctcactctccaaaggatatccaccggacatacccacaagatgtcactcactcctattggacataccaacttctctctttgtttgggacatgagaaaactcatcacacttggctagacaagaccaccaaatgcacctacatgcatatgaactaatatggcacaagatcatctacgtgcttgcttcataggcccctcttgatagtatggtgcctatctagcaaatccggtctacaccaaacaccaagaccgagaaaagactacgaaaacattcttaattcaattatacctttgccttgtgccatccaacttggggtcaatgcttgagtcaagatcaacactcgtgaccattcgcttgaaccatgtttatgccgaggtcttgaccatcctttgttaaggctttcttctcatcacaatcttgacttcattcttgtcgacatggcgatgtccttggcttggtgaccatcaacccatagtgtcatccattagcctcatcacaattagacctattcctttacacatctcaaaggagaacattagtaccaacaaatcgattgtcatcctccacttggtgaccaaccggttgcatatgaaatatatagatatgtttgttgagtattcattaacatcgcaagtgtcatatactcgtatgcaagctcaaatgcaaagatccaatataaataataggtgaacaataaatgtataggatttgctccccctaaatatatgcatacaaataaatatacaagagaggcaagtgtatgcataagttatgaagaaccaatggggtttatcctatacacatggagaaggcatgtagcaatgataaagataaacaaaaaacacataccttcatgatctccatgttctcaatgtaaaggagactaaataagataagactcaagtaaacattagtctcacacttatataacaataatatggaaatcatatatatgaacctatcaaaaagtaggagataagaagtgatacatatcactttatctccatgaatttcatccttgtcatgattaaggtccatcaccaaagaatgcatatctaccacatctcattatcgggaaataaccttgttgaaaacttatgtaaaagagaggttaatcccataaacatcggtttatcatctatcaccaaagcaacaattacacaaattgtttaatccaagatctttcaatattttctctcttttgtgatagataataatccgatataaacaatataaagagatgagatgaaagatgatttcaaatcaagatggaaatcttataataaacaaaatatagaataacctccccctcaagatgtgcatacatatggatataaaggaacacatatgcacataatcaatcaagatcaatgagagagctcacactatattttggatccacaagagagaccaagttagaatatgtgaagtttaatacatacatctcatcatttttactttcatatccaaatgagactagtcaaacaaaagctcataaaattgttagtctcatataattagatttgtcattaatcaacaaaaccaaattaaggcacttaaacttacagggtatggcataaccaccatcacagagtctttaaaaatattatagattaagagcttgtctagcggtagcccaaaaatatttccctacatctttttcttttttggaatctctgacgagatggttaagctttaaaagatatatctcttcaagacatatcctaaacttgattctctaagataaaaaagtgaatggcctccaatgctccctcctcgataccacatgatatagcagccctccctcctcgctatctaggatagggagcaagaacacttcctcagaagtggagaacaaagaaagttcagcattggggatttcagttttgggtatgcaactgttagatccattttttttttacgaaatccaaagatataggattgcgatctgcttcgggcttctgttagccatactctcatcaatacatagaaacttgaattgttaaaaaaaaaaagccacctttgatctcttagtgatggttttacgtgctaggacgctcaaactgttccaatataagattccttttgcaatcgccaaaatatacaaaatcctacgatattaggggcataatcaagagtagaccaattaggaccagagacctctcctaagtctaaatgcccattgaaataatacttcaaaatttaaaaattagaagaaaaaaagtcaaatacatactcccttcgttccattataagtgcaactataagtttctgtacccaaatttgatcatccgtcttatttgaaatttttttataattagtatttttattgttatgagatgataaaacatgaatagtactttatacgtgacttatgtttattatttttcttttaaaaaaaataaataagacggacgatcaaagttgaacacgaaaaatcatggctacacttaaaatggtacggagggagtagaaatcacgctgtatgagtaattctcctagctgaagtgatgtcttggctccaatacgaagacatgatgtcactcgccaagtcacagtattaataaaaagttgttggaagaaaaaaaagcaaaagtaaaaaaaaaacaaaaaaaaagagaaacaattatgataacagctccagtacgtgtaaggcttaaattgattttatagtacataaaaacaagggttaattagattcatgccactataaatttcactgttttgaaaaataccattactatttaccaattttaaaacataccattataacttcatatgtattggagatatgccattacataccctttcactacattcataaaaaaaatatagaccaaaataccctgtcttcttctttcatccctttctccctttccattctcttttcttttgcaggcaacgaactccgacgagcaaccacccgcgtcatgctgcaggcctgcagcaggtccctgcctccatttacggtaactgcggcggagagagacagactgaggagagagagctccagtgcttgtcgtcgccgccgccaccgctgacgagttgcaaatggtgcggcctgtggggttctcgcaagtgctcatggatcgatctgaatctaagcagaggtactcaaaaatttctcctgggtgtttgctgttgtgggtgatggagataaagttctcatttttgtggggttgcgattgtgtttagatctgaggggtctcacacttggaagaaaatttgtgtgaaaaggattatcttgtcacgtgaagaacgtttctgctgattaatctgaattcaggtaatcggtttggtccttttatttatggagaaaatggcttgtgctaactaatcccatgttcttcttgtcccctgatgatccttctggcctgtgctcaaggcgatcggccaccctgaatgtcgtgtcctgtgagcatggaggtcgctaccccacctgctccactcgagcagccgcgccgagttcctggacgccttgcgccgttgcggggcgctctcaccagcggcgccgaggaacagacaccttctacaaagctgcagagcacgccaggcagcagaaacggcagggagttcttccagcgggacgtgcgacatctcgtcagaatttattgtctggaagaggagatagagggaaggaagaaaggatgaacagagaagatgcggatattttggtccaaaaaatttgataaacacagtgaaggggtatgcagtggcgtatctcatatagttgtaaaattacgatgacttcgttacaaatagacaaattgtaatgacatattttaaaactgaacaaattctgatggtacggatccgattaaccttaaaaagaaaccatactacattgtgatagtcggcgcatgcatgttaaaaatcagtctaaaatatgatagaaccaaccgagtaaagaattgtttgtgcctgtagcagtttggctatgattgggggattctttttttcaacatgagtcccacgattcgatttaacactacatataaccttatctttttcttatacttatgcttatatttatcagctaatatttgaattttcaacctcaaatttaaaattaatttttttatctagatttatttttcagtctttttagatcactaagaaacgtatataaaaattttatttataaattactttttatttgtaaatataccatttcacttatttcatgaaacgatagggctgggccgtacacacttatggaaccgaacgtttatccgtgatccaagtatccaacactacagcgcatggtctgttccaaaccccaaatcgaagccagattcatgtcatcgtgtgtagaaactagaaactggagtacaagtgaagaaaacaaaacgaaaattttctgatccccgcctcgtccgaagccctaaacccccaaacgccgcctcctcctcctcctccttcctcgattccatcgaatcgaaccacgaaaccaatccacgcgagggcaaaatgatccagctgctgttcctggtgctcgtggcggaggcggccgtggcggcggtgctcctcttcaagacgccgctgcggaagctcgccgtgatggggatcgaccgcctcaagcgcggccgccgcgcgcccgtcgccgtcaagaccgtcgccggcgtcgtcctcgccctgctcgcctccacgctctacagcatggccgagatcagcggccgcgccgggggagaccccgaatccggcggcggcggcggcggcgcctccctctcgcccaccgaccaggtcctcttctcgcggcacctcctcgaggcatccctcatgggtaggtgttggctactcgatcaaatcggttctcgtgtgcgccggcccgatgcgctttcgtcttgggttggggatacccttattgcttgtcctttcgtactaaacagtagtcgtatcgtttttcacaaatgtagaaatccatttcgcacaaaccttcagtccgatcgctactgaatgacgcgctttccttaggtgtctgaaaatgttagaaggaataaatgaataaaatgatggcttaggctatagagagtcgtagctggtcttggagctgattcccataatcatgcctcagggatgaatgcacaaacaggagtgaacaggtgaaataatcttatggtctaatttaggcattttcttgtactaacgatacatcaaaagttcaagaaaagtctcaagttgttcgactggagcaaactcagttccttgagaggaattaaactcagccagttgggcttcttgccgcctgaccatctgagctgtttcctgtttctgtgttttgatttcatatttatctaaaaagtatacttttccaccactgaaaagattgttatgagctcatcccatggactgtagcagtcaacatctgatgagtgttctgagtaaggacaataaaaatgtgcagtgtgaacttgggggtggaaaatacaacaatgttgcttcttgcttgtctacactcatcttttagtctaaggaaaaaatgattataccattaggaaatgcttctcgtatattccacttattttaagcacctcacatctatgccactcttctactatgttaacgagaactgctcaacattagtgacatagacaacattttcctttttctctattgcatctgttgcatgcattgtgttctgtagtcagattatatatataggtaaacataagtattacagtagtgccagtgtggtctgttgtacacttgtacttgtatggcttgaagttatataatgatcatcagtaactgaataggaaaaaaaatctttcacgttgagggtgcagagctacaaactgatggttgcaatgattgtctgaaggattaattccttacatggtactgtattgactactcgtgaaatacatttgtctttcgttcataatgtgggtccaggccacatgtcattatgccaatgagaaaatgagtgcatataatggataatgcaaatattctgtgttatttaaggaaattttcccatataataagtattaaggattgcatggtagtggttatgcaaggccaaaacacataaataactagttgcatgagtatacgttattgatgaaggttgcattatgtgatgtacttatgtgtaaacccccagcatattttatgtttacacggtgctttcttttgcattcagtcatccaatgtggacattctttctttcaaaattggagttcttttcactccaaagcacattgcatatcccttatgcctttttctttaaaccctttgatatcgttgatgtccatgccaaggtagtcctaaccatgaaccacagccaaggatatctttgatttgcaagactgcaacattcgtctcctctaaattgtccaccctgttaacttccagcttggcatgtatagttctgacatgcccttgacttctaagatgcactgtgacacaacgagcagttaacttacttatcatggagatcattggctgagccagtgcagccagctgtgcccactgcccactcttgtacaagttttggtcttgaatatggttatagaaagtgcatatctgcttagttcagttgaagatcccaagtctgcatgcatgtgggttgtgaaatggtccatattatgttcaaatctcaggctgcctctgataaaacgaaaatgttctcatgcatataagaactttgccactaggtccccccccccccacgaattcatttaaaaacatatcatatttcaagctaaagctattaggttagccagtttctttaatggcagttaagtttatacttgtcctcttgtcagttgttagtttaatttagcatttggtttacttgtgtaatacactagttcaggcttggtcactttaaagctatgctaggtatagaggtatagtatactaggatctattgtagtatcgtagaggattagaaagttgaaaccatatattgatctaaccgcaagatattctcatggcacacttgtttcattttttctaaacactgttccaaccttttttaagaaaaggataatcagtggcgggcagcatttcatatgttctaaaaactacacaaaattagtgttttaatccaatcggtaaaggtgtaacagagaaatgagttcaggaaaaaaaaattgttatgtaggacgtgtgttctatatcatgcaaaaaaaaattgaatatgtgaaatgcattatattagatagtgagtggttgttcggagattaagcaatttgacaaaatatgagcaatatgaggtgggaccaccgttctggcccatgatatgtttatatactaatcgggcaatatgtttctgtttttcttttgagggtaaatatgtttctgttttgaaccaataacttctgcgctgaaagttcaatataactcagactttaaaaataacctcctaatctttaactgatttatactgaaacaaactagataattccatggcctcctaatgctacagttgcattagacaattgctgtggctgatgggtggggtggggctaatgttaacagtttcaccaatggaagtttgatttcaataattcttgcttgctacactcccataatattttctttttctgtttcagtagtgcaatcactaatttcatcagatctgtttttttttttcattttgtggaacattgatgtgaagtagggacacataaggtgctttgtttctcccctataaggcataagctggagaagggggtgtgaggatggaattagcagctatatatatggaatatagtctttaattgttctaaaatgtattccactgtgttccttagttcagtatgtatattgtcctatgttgaagttctgagcatttatgatattctttcagggtattccttatttcttgctctagttattgaccggctccaccaatacatcagagagctacgtgggctaaagaagaatgttgaggccgtaactaagcataataaaatgttggaggaagcaaaacatggaagatctgaggagacaaagaaataccaagaagagattggtgctctcaatgaggatatgaagaaactgaagctacaagtccaagaaaagacagaggaagtccacgttgctgaggacaaggctcttgctattcggaaacaatctgaaagcctgctgcttgagtatgaccgtttgctggaggacaaccagcatctccgggagcagctgcagtcaattgaccacaggctctccagtccaaaataagttcaagtgtaatatttttttttcctatgggattggagaacctagtcaatatattgctgcagaaaattttccatcacagttttggaaaaaaaaagtttacttttatcgtagaataccaagaaattcctggcggtaaaatcatttggatttaatgctcatataatatgcttttagcagtattctcccttatcagttttatcatctttgcttaattagcttttgtaatatatacccgtaggtaagttcgagcatcatattgtcaagcactttacaatttttccatgtgtggttattttaataatgtctgttggttgcattcacatgaatcatgaccaaaacttagtgtgtgtgtgtgtgtgtgtgtgtgtgttttggttggactcattcctgtgttaaattcgccaattgcattgccggtaccataacttcaaggcgattgcaatctaatgatgttgtgaatgcaagaacctcagtctccatcacacgctgcatgagctcaggagcaatttctctttgattattggaacttgtatttctttctggaaagggaaaaaagtatttacactgcttcagcagctgaaagtgtccgaccatttctagctatattttctgctaatatcaaaattatttattcgtgaagcctgtaaaaccatctgcgacggctactttcatgtaaagttaagttagtccattatcttaaaaacaaagagttaagttagtccattaatcgtcacttctgtaaaagaaataaagtccatttgtgacgaatatgcggcttgactgaaaatgagcaatcctttttcttacaattaatcggatgacgcaaatgccatattcgtgatgtatcaaattacgagtatcaatcaagagtattacaaaggccagatcaaatgtatagataaaccagcctctacaaagataatataacatgtacaagggcttgtttggtacacaaaaattgaaaaaaaaaagcagaaaaaggaaaaacacaaggattggatgtcatgacatatatatttctacaagagaatcggtccaatcgatcattggatactccacagaaaacttatagatgttttagaggaaaatatttttagaatatagttgaaaggagagatgaagagaaatagtacattgggtatctcaaagaaaatcaaaacaatgatgtttgtgttcatgtctgaaatcctccaagaatgggatataaaagatttctacataattttttcactcaaactcttgggcatcatgggaaaaatttctataatgtatcaaaattcctagaaaaatcccttatttcaaaggtgccccaaaagtaaaaaaggaaaaagtctttaactccctcaatcagaggtggaagatgatttatattccccaaccgcaaaatcggttataacgactcctccaaggctccaactactaaaaccgtgcaaaatgactttctcgataatattggctggtggattttagtaatgtagaatccacatggcatgcgtgtggtagctcagtcatcaaagaaattaaaaaaaatacacatggacccacatgtaggtgaccagaaaaaaattaaaaaagcagttgcctccttgctccacatgtctgcccatctgcgaagggaagtattgtcggcaaccaatgcgttccatgcaagatggagctcagccaacccagtcatagatagggttgaaactggttcggatagtttccgtccgtccagaacattttttggattcggataatttcggtcggaactatccggaaattctcggattcggaaacgaattcggattttttttctcggaaacgaaaacgaatacagtaagggtactatccgtcagaatcggaaaacggttggaaactatccggaatttttttcggatatccgcaaacattgagcaaattttagaaaaaacacatatatatacataactttttcatatggaatcggatgaagacaaactttatatcaacattgtagagctcgatgagatctacaactttcttattgactattttattatttggggtcatttaagggtctaaatattcattataatataccatattaatttttacaaaatttcagatctacaattcaaacgacatctgatggagatgtgttccatatcaaagttgtagagctcaacgggatctaccactttgtagtttataacatttgtatttgaaagcatttaaaatataaaacaaatattacaagtttcgaagatgtgaaataaaataaataacatctccaatttatacaatggtaagtaattaagttatacatctagtaaaagtcttgggaatagaaaatgataatcatatttacatatggatctcttagagaaacagccatgaaaatcgatttttatatatggttgtgggaccgtctacaaaaatgacgatataaatgttggagatgttgaactaaaataataagcgatatctcttccttgatcaagcaactcaatttgaggggttttttatataccggtaaatattcgctaccgtatctgtattcgataatattcgatttcatttccatatccgagttttcgattccgattccgatttcgaaaaaaatatgaaaacaaatatgataaagctagtttccgtccattgccgatccgttttcatccctagtcatagactaagggcctttttggtagagctccaactctcagatcctaactccaaactccaactccagctggagctagctcttgtaagagctggagatgatgtaaaagtgtttggctcatttggtcagctcctgaaattctgaaagagaggatagggaggagatggacaatactgcccttgtgattcttgctgtttacttcatgaaggattaatatgctttttttccttagtaatataaatgtttaacaacttgtagcatcattatcattaaaagatagagcaaaagaccacaaaataacatatagtaatatggtctatcatcgtgcagtatgaccagctagatcatcatgaatgctttgtgttatcccatcctgaaagtattggcctctctcttgcaagatatcaaaccaaatcaaaatatgtgcagctgtcacatgcagaatcacaacacagataatcacttggaaaacatgattgatgaactgaatttacaacagtttttgataaaggtccagacaattttcaataaaggttcagacaattttcaatgacttttcaagatatacataataatctatttacaaaccagcagaatacacagagcagaaaaaacacaaaggtgcactagctgtcattagctaacagataaaactgaaggcagacgtgaaatcttgatagattgcagttcaccagctgctaacctacaaaatgaaatgatataacccgtcgttgctgtgcagataccttccacacagatctggaaaccttgcacaccaccgtcgttgccgtgctccgaccccgccactgtcgccgtgctgcgtatacaaggtaaaatgcatccatccatgaataagttcaaggccttgcttggaagcaagagtccaggtcagctccaagcaaaaaaaaaccaacaatagttttagtctctcagtcataccgacatctcataacccactgaagttttgtattgctactttacatccaacagaacctttgcgaaacatctcggtatcacatatctgaaaaactaacaagtgaaagcaaggacaacagtgatgacggcaaaaaaaagggacttctagcaattcaatcttgaatccttcgtaggggtgccctctaaccaaatcttgatttgaaaatctcacttgtgacttgtctttccatcgaggtctgcaaaacaccccatgaatcaattaaggacaatctataaaaagatattgtatagcttcaaatctatcacagaattgaaagtcatagcttcctttcctccaaccccattttttggatcatcttttgttagtatgttgtgtttttaatagccacatggacacttccactttcaggggtgccttagggcctctaaattcttttgtgtgggaagttcagtccatgtattctcatagcagcatagaaagatttcatagtgaattccctattccttttctcccaattgctcagccaggggtatgcccccaatccaattatcctcccataaaaggatattttttccactgccaggttttatactaaagaattctaaaccaagtgtgtatataaccatttgctgatttactcaattccaaccaagtgtgtatataattgtaaacacaagctacaacactaaacaaaaaaagttactagagagctcatcactgctctgaaatttcacacatcccaattgctcattgcatttttaccattcatcactagacaagtcttcagttctgaaacttccccatttgctcgttgcatgataacaactactcaaccaaatatgaagggaagaggtgagggaaatttttagggtttgggagaaaatatcgtgctgccatttggggtcatcgtgcaccgtctccatccaccttgtgctaccgtgcttgccctcagccaccatgcgcccccgtgctccccattagccgccatgcgccgccgtgctcgccctcagccgctgtgcgccgggatgggaaggagggggagcgacactgaaaggggaagcccatgcaccggctatttccagccggtgcgtcgttaccgccggctgcttcctcctccaccatgcgccgtctgctgcttcgcctcctcgctcccgcgagctggaggttggggaagacggggtaaagcagtacgggagagagggatggggggtagggcgatggcatttgcggataatttcatcgaaaatatgtgagcaattctataacgtggttggagttggagttcaggagcgaccaaaatgccgctccaaccctccagttcaatttctcagagcgattccatgcgctccgctccagctttgaacagatctggactgtttggttggactccagctccaggtaagttgaatctgggagctggagccctgccaaacaggccctaatgtcgacagagaaaggtgaatgcatccatgtgggcccttctcatgcggctgtagggaagagttcgaataggagagcgaggcctcgcgacaggttgtcccagtagtggcaggcagcgacccaagggcatcttgaatggtacagacgagcttggtacgattggcgagcaaggccatgcatgtccatcaatctctatggagcaatgtcgaacgttagcagcagaacaacaaatatcaccttccgctccttgctgtcatcttacgtgcccgtcctagcctctgacgatcttgacatcctgaccagaccaaaagaagagagagaagggagggagcgaagaggggaggagccgctggagcccttcctagctccggttcaccgtcattgctgccctctcggcttctcaagtcgctactgctcctggaaggtttgagaggagccagagaaggcaaattgaaccaaaattgatagttgactagttgagggaggcgatatactcggttttgttattgaggcatgtcaattagatcctgtcaatagtcgagggactcagaatgaactttttccaactaaaagattcaactagaattgcccaaatccaaataggcccatagcccatcatcgtccgcgcccctcgctccctcgcgcggggtgtgttctagggtttaggcggttcacccgctaggcagcagtatataaactgctctcttcctcgccgccatctagggtttcctctccgccgcgccgcctccctcgtacctcgtcgcggtaagctgccctgcgccccgcttcctgtctcctttctctctcgtactcgatggtggcgcttgctcctttcgtctcatcctgccttcttctccctctcgctgtgcaggatctgtgctcgcaccaccggcggcgccatgaggtacggatttcacttgttcacagtttctcagtgttcgttctgcccattcgtagttgcctgactaggcgccgcatttgcctgcggagctgcgccgccgcgaattgggggtaaaaaaaaatctggggatttaggtaggaagagcggcctcggcaaatgtaggagcgttggatctaggcgggttgattgaactacatgccagatttggccggctgcaccgcggattgcggcgttggtcgtgggtgtggggtggtgggaaatgattttcgatgctgcatcacctgcgggcaacaaccatagaagaccatcgggaggtggtcgcgttgatagtgtcgaagaggctgggttctaggatcctgatattttccacattgtgatgaagtgttagggtatgttgatctccctaatggtgggattaggtttttctccgcctactcacatctagtgcagctctcagccatggagcttgttccttatgtctggtggtctagctaacaggattgtgattgcgccgttttatgtcatgtattttcttaaatattttgatgaagctcttattttaactgtaagatggccttttgtcattgtttgggctaaaccgtggcaatgccagctaacctgtatagcttcagtagatgctggatttgttgttccatacttgtagttagctgttggctgcattatcttatagaaatgcttgaaagggaacttgttgtatttgatttttgcaattctatgctcttgtaagaaaaagatctatctcttgtagtgaacaattcacaataatagactcctcacatgttcattaatgccaaacttattattgtctactgttgcagtaagttgcagagtgatgctctgagagaagcgatctctcaaattgctaatgactctcgtgagaagcagcgcaaatttgtggaaaccattgagctgcagattggactgaagaactatgaccctcaaaaggataagcgtttcagtggttctgttaagctgccccacatccctcggcctaagttgaaggtttgcatgcttggtgatgctcagcacgtcgaagaggtatgttatgcttctactgattttgcattgacttggttttgatatgagatgtggagagaacttttatcgcaattgggtagttactactacgtatttagcaaatgaatgcgtgttttgctgtgtgatctctgctgttttgcaattatttctttctttagttaaaactaaattctccttaaccattatagccaaaggttctactgcattgactgtgttttgtctcaatgataaaacaaatatttgtactcttggatactgtattataatctttgttctgtgtaaatgtgtgtctattctattgtcaaaatgatagatattgaatgctcaatcattataccttgcttccaaaatcccaaacgtaaaagttttatcattgattccacttgatggcatatggaaatttgtattcttgagtgtagtgctcattcatcggactattaatgtctggctgataattctatatgctacaattttgggtctgcaggcagagaaaatgggcctagactatatggatgtggaagccctcaagaaaatgaacaaaaacaagaagctagttaagaagcttgcaaagaaatatcatgctttccttgcttctgaggctatcatcaagcagattcctcgacttcttggtcctggtcttaacaaagcaggcaagtggctttttccttattccatcttttccacttggtttcagtggttgtatatagctgttattaactagttgagtggtttcagtgccttttctgttgagttaacagttataaactggtagctaggaagttccagtgtcaagaatttttacttgattatcaagattttttcaacccttttcacagaatcatgctctgctggtacagaagttctttgttatttattccttggaaacataaactccatatcaaccaagattttagcttacgaacttattgtttatactgtatagagcttatgataacatgagctatgcattgatactaccctgcggtaggtgctagcaattgattctattatttcctgcccatgtttgttcatatgcccttgcatttatcgactgcaggcaaattcccaactctggtgacgcatcaggaatcacttgagtccaaggttaatgagactaaggctacagtgaaattccagctgaagaaggttctctgcatgggtgttgctgttggcaactgtgctatggaggagaagcagatcttccaaaatgtgcagatgagcgtgaacttccttgtttcccttttgaagaagaattggcagaacgtatgtgatcatgtgttccttatagcatagatacaaaatttatctgccacttggacatcagcctagttattctgatgatttgacatgttatttgtatcatcgtgcaggttaggtgcttgtacctgaagagcaccatgggaaaggtgtaccgagtgttctaagttattttctttaggcttctagatgttttggagactaagctacttgaaacttttgctactttcccagtcatcaaattttgtgcaacagctgaggattaaggaattcggatttaattgtcctgtactaagttgcctctctctttggttgaacatcattacattttatccatcgagatcattctgtgatgacccaaaatcctgctgtgcagaccttttattgtcctgatctttattagtcttagcagcatgagttagtgagaacattaggtgctcatatctttcttgcctgtttgttaaagaaaattattggatgcacacatcacaatggaattttagagataccgatacaccttactgttgttttgatggatgtagcagaatagtcagcttatctatctcggttaattatgctgatgcaattagaaagtggctaacaactggctggtcttgattcttcttcatcggctttaccaaatattgctctgaacctctacctatactgagaaccacgaaggcatggtaggatcgaagccatactccgtctagagacaaatcgatgcagtcctggtaatgttgcctcatgttaatgtagactacgagggcatggtaggatcgaagccatactccgtctagagacatcgatgctagtcctggtcatgttgagctgaggcttttacgcttgtaccatttgaacaccgaaatccttagctttgggacattctcatcacaatgtaatgaatagaatagcgtccatagaattataaatgatttatcacataggatgataaaatataatgcgacaaatcatatgagacatggtttttacacatcatctaaggcaataataagagagtagaattaaattcaaatataaattagtcatgtttgcactagtatataaattcaaatatactagttttctgatgatgtggaggatataaaaatcatggctaggtcattattatttcttagaatactttttaaaacgactttttaacttaataatatttaatttatttgttcatgtccttgaataattatctatcaagaactgggccggctgcggacaagctgcctcttcataagcctatcatgtacaccttgatatccacctaaagagttgaggttcaggttcattatgcatcaagagcacaggaaaagaaacagtgcgacaaatttatacgcttggaactatcaggttttctttttttattgctaaaatatagtgaatatgaaatttgaaatgtaggtggaccaagattaattagaggaatatatgcatattttttaagagtttttgataaaatttataattttaaatgtacgatttggttagttcaacttaaaaaaccatgcctattattgaaccggaaaatattatcgaaccagccccaagtttaccattggttagactagaataaaatcggagccagcccctagtccagttgactagttcaactaaaaaaaccacacttgctattcaaacgaaatgtagtccagtttggtttcttgctaaaagattgcacttgctattgaactggaaaaaaaatgatcgaacctcatggatttatatagaattggtggaaaacatagcggttagaccagttgcaaatttttctcaagaaaattcaaagcgagcgcataggaaagggaatgtgcagtgacggagtgagcaattttaccttatagggtcaattatcattgcttatattttagtagggccatttatgtaaaatccaatgaatttacatgaaaaaaataactcataagggtgaatgtgaaaaggctgtggatcagccaatccaacaggctccgcaactaggaatgggaacgaaacccatgagtagctttgggagcataccatcaaaaccaactgggttacatataagcgtaacttagacgaatgtgacatattctatgggccttatcttttcgcttatgtttatgcttatcagtcaaaatttgaattttcaatcttaaatttggagctgattttgaggttttttcattgaagtttattttttagcaattgcttttagatcgctaagaacacgtatataaaatttttattcacaaattactttttgtttgcaaatatgccgtttcttttatttcgcaaataagccaaacgatggctccgtttgactacgaatctaaacatccaaattcatatagtcataggatatgtcacatctatactacgttgcgtttatactaggacggagggagtatgttttaacctttgagtcaaccaatacttcaacaaaaacttataattttgaatcggcgggtgaaccggcagttctacctatggaccgatgaaccaatggcatcatctgtccgggcttaacaactacgctagcaccacaccagttatgctactccaacatagtttgtggatatgtttagcctaattggattgcccaatgagcatcattatttccagtgttcccatgtacactatttgattagcccagttggacattgccccattcaattgatgcttagcccagttggattgaccaactagcataattaattccagtgttcattaattccataaccctaattcgaattaggcctattctagaagtcaacataggaatccaagtagataacaaaagtgaccattagctgatcaagatacataaacggtgtgattccgtatggcacttcggtaattatcagtattttgatatttttccaggcgaggccggtaaactgagaaaacgttcggtgaaagaacagctaccatgtgcatgacttgttcctttccatggctttattgaaatgaatccattggttttgacgctttgacgcccatctgatcacggtgaacagctatatactacagctaggcaagaccagctatgccttcacgtggatgcatgcgttggtccatagctttggagaccccaactagtagtaactagctagtacagcaaggtagtcggtcgatcgatcgatcgatcgatccagctttgctagttgtcacagaggtaatcaaatccaggagagcaggaagagatacatatacaaattaacaaacaaacaatgaaatgaaatgaatatgaacaagctagctagctagcaagtagagaggaagaatatgccttgcttgcaattatgtggtaattactttctttttgcgagaattatgtcgtagttacgcttgaatcggctgggacaaaggcaattggagagagattcattgtggtctgtggatcgatgggataaggtggttgggatgaaaagcgaagtggaacttgtctggcttgcaaatcacggcttagttgtagtgtgctttcagaccctagcaggttggttttgccattaaagaggttattgcggagggcattgtgacagtaagcgattgtcggatggcaaagtaatgcatgcaagcaaacgaccaacagagcaggagaagtatatgcccaaaagcatatcccatagcatcatatatataataatcacccactaattgcaatcatatgtgattctaaagcttcctcactgtaccacatcgtataaactatgattgatcaatataaactactacctccatcctaatatataactatttctaacacgataatttatttcaaaatgagactattttttcacgtaccatcttctcttaaccaattataaccattctctttacctactttcttttctccactaatcacaacatttcttcaatcatctccaactactttcttaatattcgtgcttacctaaaaatgcctatattctggaatggggaagtacatacaagttatcaatgtataaaactgtgattgatcaaagtaaattaaataaattcattttctaacagatggcatattgaattatgtggacaacaaagcatacataaaaggtaaattttgttgtagaacatcatgactttgtgatttatcttctggataaagcaaaagtcaatgtttggaagaagacactgccaaaatgtggctatttactattaaactttccattttaggttgaataggagaaagaaagtgtcaaagggccacttctcccatctctcttctctcttttgccctatctctttggcgagcaatgacacatatggcagagcaagtaagttggtggtggtttattggcttcaggcagctgggtgcagcaatgcacccatgcggcccgacgagccaaagcagagcagaagcggaggcaatggttgggatggtcgatatgtcgagcttcggtggacgagagggtagtgagaggagatgggaaaggagtagtgcacatggaggaaaatagacacctcaattttggacgagggagttcaagtgcaggaaatttacggtggtcgagctagggttttgcagagttcgtgcccaacaatggtggatggccgggtatctctggttagatggtagaaaagatcgatatgaactctctttctcccatagtgagggttgaatttaggttagagcggtggtggagcttgggcaacgggaaaactcgaatgaggggagctcgagctcaggcaaggcacgggcctatggatgtgcataactgcgcagaacgtgcatggggccagcagcaagcccttggctatggttggcatatgctggtgagagagaagggaaagaatatgatgagtggggccagggacatttagatgtattatattgttcctctcaaccgaaaatgaatggggaatgtgcacatggtccaataacaaatagtcatatttcgagagtgtcttccatgaagtatatatgtctacaataaactttgcctaaacaaaatcttgacctaagatacctactgcaacaaaaaagaacttatatcaactatcaaaacgttttcatagagacaattttgatattgtcaataaaaccaggagttacaagttctttgaggcatattaattagagatatgtgcaaaacaatcatttgacctatagtttttagatgcatttttagacaattttacctttgtataagtgctttttagaagttttatttaatttgaatacgatatagacagtaatgccatgcagcaacaaattataatatgagattgagatgttactctctgtcccaaaacgaagggactagtatattgaagaaataagatgttagaacttttctttggttttgtttttcctatggtgtaatcaaatgccatctcttcatgtttcttatgtttgtaattccaacataattagaaaaaacatgctagtcgattcctttgttttctgtcccactattcaaagagggtcttagaatatcaccatgatgatacagtaacaagaaaaattccctacttgccccagagagttcgctaaatctcttatgtgttcttgaatttttcttcatcccttatacgcctccgagttttcattttgatctcctttatattcattccgttagttgatcatgaattgaccattaaatgttttacatatcgactgttttgcccctctctcatacttatatgctagtttagtgatataaacacaattcttaactgagaaaggatttattttgtgaaaaacaaagggaatataattatttaacaaaaaaaattaaaaaataaatttaaaattttcagataatttcaaattattttttttgaaattcttacaccattttcaccaaaatttgaccaataataaataaattggtgctcaatttatggatgaaactcttatatagatttagtaaaaaaaatcaaaagtttaaaattatttttcaattttacatcaaataattctgcccaatttatattttttaaaaaaatttaggaagtagatagcacataagtatgataaaggggtatataagtcattttagaaaaacctaacgatcaattaacggaatataaatataggagataaagatgggaattcaaggttatataggggatgagataaaaatcaaggttacataaaggattgcgaaaatttttagacatatagagaattttctcaacttgttatacacccacaatccgagcagtcaagttgtcaacagacacacgagcacagcgagccatcagtgagttgagagtcgaagtgtcgcacgctgaacgatcagttttcagtagtgtcatcaccaatcaagaactcatagctaattccttgtgtattattgcaactcgaatagcctctccaaatgactctccaagctaaattttgctaattcttacagaaaaatgtgctccaacagcttctctattcaacttgccaagctatttagctggccaaatcctttccctcactagccaaattcggccagccaaactcactggccatctgtgggtcccacctatttctccttctctttcctatgcatccgctcgctctctttctcctttttctgccgacgatatccctaccactgccgcttgcgaaatcgacagcaagcagcggctgcggtgctcctgccggcgtccatcactcgcctctgccacccgccggcggtgaccttgttgccgctggcctccaccggctcatgtcagcctcgtccgcggtcgtcacctcatctcctcgtcgagcgacgacgacgacgcgcggaggaagcccacagcaacagacctccttcttgagctggccgtcggacggcggcggcagtggcgaggtgcgcgcggggagcgtgaaggggcccgggaccacctcgagcccaccgtcgccgctggggtggggctggtaggcggaggcggtgcggccgtggcggcggagccatctgcagatgccgtcgacgacccctcccccgggcatggtgctagcactgctccggtgacgccaagcggcattgcggaggtggcggcggctgctcatcccgcggggttttatacatcgtccgtccgtcatcgcctcgcgtgctcgcgccacacgaatcgacgtcgccttgcgcacccgccgtccgccgttgccatatcagaggagaaatcattggtggagaaaccatctttactcccagttgggaaccccctttagtctcggttttccaaccggaagtaaggatccgggactaaagatgtttaatcccggttaaaataaccggttggtaacatcaactgggactaaaaagaagggatcttcagtcccggttgctgttaccaaccgagactaaagagacaatagcggcagtaccagatgatccccttttctttttctttttttcctttttattttctcctgaatcaagtaggcaaatccccaaatccccaaatcaaagtaacatcccaaattcacatcaccaaatccacatcataaatcatagagttacttatacacacaaatttaatacatcacaaaatcctaaaaaattacacacaaatcaaatacatcacatatccaaacaatgaatcacaaatttgtacatatcagtgaatcgcaaattttttttttaaaaaagaagaaaaaataatgccgttaccgccgctcgccacggccgccgggcgtggccctgccgccggctccaccggccgccgccggtcgcggcgccgccgcccgccggcccaccggatgggaagggtaggaggggggaggaggaaggggaggagaggaggagaggggaggaggtggaggagaggggatgaggaagagaggatagatctgaggagaggggagatatttgatctgtctaagttgtaattgtggaggagagaataagtgatagggattatatactatgcgttcaattttagtcccggttggtaataccaaccgtgactaaagtggtgtaataccaaccgtgactaaagtggtgatctttagtcccgattattgacaccaaccgggactaaagatcctcggccccctgacatacatctgacaagcgatgaacatctttagtcccggttggtaaagatcaaaatttttataatcaggactaaaaacaatctttagtcccggttttttttggaaccgggactattgtggattttaccagaccgatcaaagatggtttcttcacccgtgaatcatcactagctctgttaaattcatccgtacctcactgttaattagctcatcatctagctacaaatcgatcgatctcaggtttaattcctattaatttgctagctcgatcgatcaatctgttgggtgatctcttcgatcgccggagcttggaatcaatcgagagatctatcagagtgtacgtacgtgagagagctagcaggagatcgtcggcgatgccacgatggtgaacacggcgaaggcggcgacgaagggcggcagcgggctgccgctggcgtcgctgaaccacatcagcatcgtgtgcaggtcgttgcagtagtcgctcaccttctacaccgtaacaccaacgtgctcggcttcatccgtatggatgggggaaaatgggatagatgaggaggaagaagaaggatagtagaggttgacacgtgggttttatttgtcataggtttataatgtagaggcggctggagagactgttgaagcaaataacaagtttgacttgtcaaatcaaatagctagttgcctatatgagtgtttggagagcctattttagaggtactggcggagaaaccatctttggtcggtcaaccagatttcacaataatctcggttgtattaaaaaccgggactaaaaacatctttagtctcggtttaaaagctccaggggtactttccaatctttagtaccggttggtgttttcaaccgggactaaagatatatttgtagtcccggttgataacaccaaccggaaaaaaaagatcgccatacactttactcccggttggtgttaccaactgggactaaagatctatttggtctcggttggtaacaccaaccgggaaaaaagatcgacgcggagatcggagaggcctgcgcgatcggatcgagtatctcctcctctcctttaactcctccctcctcctctcctcaaccttatctcctcttctctttttaactctctcctcaaccttatctattcctctccttatctattcctctccttctcctctctacactgcagcggtggggctaggatgctaggtcggcgcgaagcggcggggtgcagaggctaggccggcggggcgcggaggctaggccggcgaggcggaggccgccgccggcggcctagcggctggcgcgagggcggcggggcgcggaaggcggcgcggcgcgcggcgagtcggcggccgccggcgcgagggcggcgcggcgcgcggcgaggcggtggccgccggtgacggcctttgaggcggcggcctgcagcagcgggtcgcggagggccggccggccggcgcggcgagcggcgcctagcggtttttttctttctttttttttttggagaatctgagctgagattgttgtgtgatgtatttgatttgtgtgtgatatgaatatgtgatgaattttgtagaagttgtgatgtaattttttttaagattttgtgatgtatttgagatgatcgatttgtggatttgaaggcaatttgaggatgattgttttaggattttggggacaggatagggtcagggtgaaattaatatattaaaaataatgatgagaagaaaagaataaagaagcaaccggatctggcctctttagtcccggttggtagataaaagtatctcaccaaccgggactaaagatagcgatctttagtcccggattcgtaaaaccgggactatataggggttacgaaccgggaataaaaaccacttctccaccagtgagtggctgttggagatgctcttactctactactctatgtgttcggttactgaggttgggaacccatctccccgcatgaaaaacggaatagtccattagcacgtgattaattaattggcttagctaaatttttttcaaaaataaattaatttgaactttttaagcaactttcgtatagaaacattttttaaaaaagcaccgtttagcagtttgaaaagcgtgcgcccggaaaacgaggcagaggggttggaaacttgagttccaaacaaagccttgtcccaaaatataataaactagaatcggatagaatcagataagatatttcctaatactataaatttggatccctttcaattttagatttttatattttgggatgaaggaagtagcttaatacatcgtcctcgatatgttgtactccttccgtcccataatataagagattttggtgggatgtgacacatctagcactaggatatgtcacatcttatcaagatatcttatattataggacggacggagtgagtacacgaatcaccatccattactgcagaacaattaaggcacttgtccagattaattaggcacacgtacgtgtgcgtactgccgtgctgtagtacgacggattgacgggcgggcgcgctcgctggatcgtgccaagaccacacatgccagtccatgcgttgcatgccattcatggtccaagcaggatagattaggtgcagaggcgcgcgcgcgagtaaatgcgtcgcatggagacgtgtgatcccaaaaagaacacgcgcgcggcggtccagcgtacagtataccttgcggccataactcgattgcgcgcgcgtacatgccttgcttagctctcgtctctcgagcacaaccacgcaaaacgcaagacgcagtggcgatacgtgcgtcagtgcgtgcatggtcccgcgccgcgcgcagctcatcgaccatcgacgacacagctagcttatagcgcgcgccccacgtttgaaagctagcaaggactgtgctgtactcatgtggcacctgggcgtcacatggggttgtgggaattcaagccctcgaaagctcttgtgtccgaggttttccttttccagaatcggaattctcagctagtgggtttttagaggattgtgaaatggactctagttaggggtgtttagatacatggtataaaattttggtgtgtcacatcaggtattatataggatgtcgcataggacattcggacaccaataaaaaaaactaatcacagaatccatcagtaaaccgcgagatgaatttattaagcctaattaatccgtcattagcaaatatttactgtagcaccacattgtcgaatcatggagcaattaggcttaaaaaatccgtctcacaaattagtcgcaatctatgtaattagttatttttagtatatatttaatacttcatgtaggtgttcaaacacaaatatttactgtagcaccacattgtcgaatcatggagcaattaggcttaaaaaatccgtctcacaaattagtcgcaatctgtgtaattagttatttttagtatatatttaatacttcatgtaggtgttcaaacgttcgatatgacacggtgaaaaattttagggtgaaatctaaacatgggcttagcacgtactactatcattttcccccacctctcatcatgtcatcggggaggtaataattaggatatgtttcgttagaaattaattttaccacatcttatcttaggcaagtcataattttcatggataatgtttggttcatactacaaatctaatttgcctaacccttagccatctgaccacatatcatatactatatttcctaactttacctaagcttagtttattattttgtttaccacaaaagtgtagcaaaactaagcttactcatcttagttaaaaatatggcaacattagtcctcaaccaaacatgccctacgttcggaaatacctatgcatggggaaccgatctgttggaaaatccgaacaattgaagtgctgcagttgactgttagtgaaacaatgaagatatatgctgtgggaaaaaaaagtcaatgaaatgatatgtgagacaccataaagtgcccgtcgatcgtcgacaggatatagttacaataattaacttgattgtagatacctccaaaatatagttatttctagcacagtacattgtcctaaaataaaactatttctctacctacctcctcatctcaaccgatcacaaccattctttttatctactttctcttctaaaccaatcatgcatttcctccaattattttcacctattttcttaatactcatgccaaccttaaaaatacttatattttagtacggaggaaatatgataaatagtttactgagaaaaaaatttgaagctcgctaatagagcatttatccttaataaggttgagttcgtttcaatgtttaagctcaaattatggtcacgcgaaacgagataagtcattagcacatgattgtccgagtgttaattattacaaactaaaaaaagatttatttgattttattaatgatatcgtttagtaaatatttgcataaaacatatcgtttaacagtttggatagcatgcttatatacaatgaggaagtagtggtcccaaaaagttgtttagaatgaacccttagagagactacttgcatgcatagagggataaaggaagcccatatgaattgcatgcgcatagatcgatagttgatattttggatattttatcactacaatcacctttgatatttgagcaatagtaatattttagtcatatttgtgcaagcaatggtaaaattttgcaccgtacaaggtgtccttagttttaggctatgggagaaagccggtgatggcaacgacaagtcgcagatccagtggtggcgatgatctagggcagagatctggcggagacgacaggtcccatggcacaagcgtgggtaggcttctatgaggctccgatggtggatcattgtccactacgctgacgaggagagctcgtccatggcagcgatagatggagtggcggcggcgaccgctccttcctctcgtcgacggtggaggaaggagagggcggcgcagctcggctcggcttgttcgatgcggttccagatcttgccgagctaagtcctccctttccatctccacctgcgacgaaccaacatgacgaccactgacagcattataacgatgacaagcagcacggcgatggtcgaagacgatgctattttatttgcttgtgttgttgtatgcatgttgaaaatggagcgaaaaattgatgtagtgctctctggatgtggatttgattatggatctaatgaggatttgaattgatttcaatttgaatctctagatgtggatttcaaaataaagcaacttctctggatattgaatttttttggtaaaaaacctttttgctggcagtcgcccattttcgcagtcggtcctcttaatagcccgcctacgaaaattagccaacttataaaaattaacctgcctacgaaaatttattttcgcaagcggactatgtctgtcagcaacaatgttttggagaaggcaagatgaatgaaagctgccacttgtgcattcgatgcaccatattcaccacaaccgtatccgtggcgcttgcccgttcacccaccagctaagctcccactccacgaggtccgctgccgtatcctcccctgagatctggcttcactgtcatgttctccacgtgcctcctcattctcaagctccactgcctcctccttcaatagctttgcacaaatgagctcaagctctaggttcaccatgagagtgagaggcaacttggagagagacgggagagatgataggtggcactgctaaaaaaacatttttacatgtggtcaaaatttattttttatgcggttggaccaaccatcttcccggagatgtctacgaaaatagcaatattttcatgcggtggctcacccgcacgtgaagatctgtgtttttcctgtgcaggtgcttatattgtccacataaaaaacaaaatatcaccaaaaaaaataaaaatcccaaaaatcgaaacctagtcctgctgctctccactccttagctacagccgacatatcccatgctcgccggccatttgagcttgccgtcgcccaagcttgccgacgctgttggatccgaccaggctggatccgccaccctgcgcccagtggccattgggagagaagaagccaagggagtgagggaggagaggtggcgggatccgcgcggtcgcaagacgagcctgccactgcctgagctcgccgcagtcactgtcgccactcctaccaccggtgggtccactgccgctagatctgaccaggccgtatctgccaccctgcgtcctctggttgttgggagagaagaagccgagggagtgagggaggagaggtgtttgatccaagcgatcggaggccaagcccgccgtcactcgccatcggtggatctatcccagccagacctgtgactgacagatccgcctctccgtgacctcctgccgtcgagcccaccactacttgtcctcgccgccatcaccgtcacccccgctcccgccgtcgccgccaccagccgagcccccaccagctcgagcagcgggaaaggaggggagaagttagagagagggggggatgggtggggagagagattgtgaagagataagtatgagacttgaaaaattttaaagatgttggagggaagacaggagggaggtcagacttgtaggcaggcctgcgaaactgcattctcgcatgcggtcacttaggaggtccggctgggaaagtaagtatatttttgcaaacggtcctcttaagcggctgcatgcaaaaattcatttttttgcatccgaacgttcaactaacccccgagtaaatgatttttgcagataagaacagttatggcccgcctgcaacctaaagggggttttgtccagaaaaattaattatgtagtagtgtgggcaccaccatttttccgactagactactatatgtaagttccacatagatcaaaattactctaatttatagtaagggagtagattaaacggttctgagagttagagagggtataatatccagtattatagtttaagagatgttttgtaaataaacatgacagttgaagaggtcaaatgaacttatcctaagcaagaacatactaatccaaaacgaaagagaacaaaacaaacggaagcatgccattcctttaatgataaatctatagttttcatcgtattatcatgtagtcactccttcctaaaatatactccaacttagtattggattagacatatcctataatattataaattttgaaataggatgtgtctaatctagtactaggttgcagtatattttgtaattgagatagtactccgtattaattagcatttatttttttccttcaaaacacttcacaccttaatactttgtttagccagcaaccaagcaaaaaaaaatcttgcattttacttgagatcactccctggtccctggttccttgccagatgaaagctgaaagcggcttctctctctatatatggcacctccaaaaacgatcaatttgtccttcagtccagacatacggattttggatttttcgcaacacaaaactcaggtcctcaagtaagaaagcgattgagatgttattctaccttgattatatatttatggcaatttttgctacaggatacttcgacttcgtggttttagccgtaggacaccgcccgaactcacttttggggaaaaacactccataaacatgttaatttgccaatggacaccgtgccgattagaataataatttttggttgaagagaagagagaaatcgcgtaaaatgtcaaaaatgcccttgggcccacacgtcagctatccaatctctcttttcttctctctctatcttcactccaacgccgccgtcctacgccgatgtagaggtccgccaaatgttgagacgggcttgtgccaacgcaggaggatagggcggccaccatcatcgccaccagcctttgctccgcgtcgccctgcgggttaaccgacagcttcagggcagacaagagagaagccgccactatgtggttgccattagcgatggcagcagctgcctcagaaagaagctgccgtgatgaagccgctgagatcggtggcgagctagacgctgacgacgaagccgtggatgaagaggagttcgtcggggaccgcgccaatagcgcggtgttgttcacgacggtcagcaggggaagcgacggtgacgatgcggcggtgacggagttaagcctctggatcgtgtcaccccaatcggaggtcatgaaacccgagccgcaaccgctccctgccgcgttcgccccgccgtcctcaccatctccttcgccgtgacgagcacgagccccggcgagcgacgccgccccgtgccgcttcgccacgtccttgccgtcctctaccgctcccgccacaagcgttgctcgccgccgccgccttccacctccctaccccctccactgccgctgagggagggatggacgacggcctgtagacgacgggagcatggcggcgttggagtgaagatagagagaagagaagagagatgtgatagctaacatgtgggcccaagggcatttttttgacatttcacgtgatttctttctcctcttcaaccagaaattattattctaatcggcgcggtgtccattggcaaattaccatgtctatgaagtgttttcccccaaaagtgagttcgggcggtgtcctacggctaaaatcacaaagtcgaagtgtcctgtagcaaaatttaccatttatttattatacgctaacaaagtaagagaaactatgactgccgcatgtaacacatgtatataaatatgtaatttccagctgaaatacttgccgtgtggatgccagggataactgtttcagctgcaggatatatgtacgatgtcttctacagtaaattgaatagcgatagcaatgtctcgactactagatcttaatctgttctctgaacaaacgcgaatccgcttgagtgtgatatatattgatgagatctgtcccaccattttactaattagtacatgatgcacgtgactaattcgtgttatttgactttaaaataaacatatagtttagggcaaagaagcacaccacattaataaacagatagtatctcgaattatacatgatgcaccagtgctaactactgcgcaacttgcatagttctatatatgtctcaagaaattgcaacctctagttgcatacctgcttgttttgcactgctaattcaaattggtcattttcagaatattaatggtttatttggttgtgtgcgtgaaggcagttcgatctgtacaaaccacatgccgtataggaccataaccaaatatttgaccagaaatggtagaaccggtaaagattctcttaactagctagctcagcagaagggaggaccagattcggactttcagtcatcatgacaagatgaaaaagcaaaatgctgatgtatgagctgatattctggacgatttcacgcataattctaaagaaaacaaaagaagaaaagagtaaagaacaggtttagcagcagcgttctatccccttttaggtaaaaaatatctgctttgatcttctgctcaacttcacaaccgatttcgatcacatattcacacatatgacaaaaaaaaaacatttgttagcttacctacgctgtaactaaaaatgaacagatctgatgaactcctcacaaatctccacaaaaagggtgtggtagttggggaaaaggaaatttgttggtgtcacatagaacgtttgaccggatgtcggaaggggttttcggacacgaataaaaaaactaatttcagaactcacctgaaaaccgcgagacgaatcttttgagactaattaagccgtcattagcacatgtgggttattgtagcacttgtggctaatcacggactaattaggattaaaagattcgtctcgcgattttttccataactgtgtaattaatttttctttttatctatatttaatgattaatgcatgtgtccaaagatttgatgtgatgtttttgagaaaaaattttagagaactaaacgggcccaaagaccagacacaagcagtgacacaacactgccacttggacccagccggcctctcgccgtcgaactcccaacgcagcagccgcttcggtggcaccgaacccaacgcttcaggcacagatctccgccacaacagcagcagcagctacaagtactcctactactggttaactggtcaggtgaatggtcagagctgcagccgaataacgactcgacactcgacagagcggcagccgcacagggcatattttctgccagtgtcagtgccagtgggcagaagccgcccacgtcggccgtcctctactcctcttccctccaattagctgaggccacaggagagggagggggaggaagcggttgctgtcacggcacaactgtctgtgtaggagaaaaatcggttggtgtggccaccaccaccctatctaccgccctgcactgctgcatctggcatctgctacattcatgcacgccggtcactgttgtgttgagccggttgatgcggaattttggtcgttaggagtagcctaactagtctgctcttaagtgtggccatcagattagagtattgatcagcgatcatggttacagaagtacagaagtactagtagtgcttttctctttagatccttcgtcgtttaatttttccgtaaaaattgaaaggtggaattaagactgtattacaagagttttaatttggttaaaaatagtactcctagcaaactcctccgaaatctttgcagagttgttaattatatttgagacctcgtcaatccaacacaatattttcttctttttttttcgttttctattttgctggaatttattggacactttgtaatgaaattcttgtgtccaaagggcttatacgatcaagtggtctaaatggataaattaattacttagagactatttatgctaaagcaacaaaaataatcgttatctacatcataattagtccaaacggaatatacactttgtgggtctttacttgcacaccatacttgcttttgtctcctgtatcttgttcttctggatcccatatcttttctcttctgtgccaaggtgccggcaaaggcatccccaaaacaaataaaaaaatcatagacatcacaactaaacgtgcagcttgtcttaaacaaatgcaggttaataagccaagaagggattatgttagccgctaaatatctcgtggaagatcactcccaaggtgcttcccgtcgcagaacaagatcaattatctcaccacctaattaattaacaacacatctcaagccaattgcgtcaagaaataaacatatataaaagacaagcatgtgtcacacacgatccaggaaagcaatttaattagcagttaacggtgtgattaaaatctgaactcgtgattaataatctggtggctagttaattagcaccatcaatttaattccatgttggcctcgttgatctatgtgtggttatataataattattttgcaaggacgcaagaaaatttcaatctggtgcgccttgtgctggagtagcattgccactaaaaaccaaatctgcaagcacaacgctgatctgccccaactgtgttgttaggttaagctgtacccattctaggattgatacgtacaataaatgcagatagagggagagacttctttgtttattgacaaccacatatgggtggaggtagacacatattaggtttagagaaaaaaaataagcacgggaaaagaactatggattattatggccctctttttttaggcttagtctgattggcctagacttttaagtcagcttattggtttatatgatttataagccggtggatttaatgtcctaagtttagtagttgagtcatacatctacctcacataagccaaaaaagcttctccaatctagcttttggcttaatagtgttagagtggcttatggcttcagaaaagccaaacggaaaagctgcttgtttgtttagacttagacttttcgacttataagttggcttataagcctaaacaaagagggcctatacttatttgttattagtggcaatgatatgtatttcacatggcactatacattaattagtaattagctactccctccgtcccacaatataaaggattttaagttttgcttgcaacgtttgaccactcgtcttattcaaattttttttgcaaatataaaaaacgaaaagttgtgcttaaaatactgtggataataaaataaatcacaaaaaaataaataataattttaaaaaaatttgaataagacgagtggtcagacgttgcaagcaaaaactcaaaatcctttatattatgggacagagggagtactacatctcctatatattgtctgtgcattatataaaaatatatatactggttgagagacaactaaatgtatagtgatgtgccacattccaaatgagccttgatatcttgggaattaggcccaagttctcaattgatcgtgcatccacaaactgtttcttcaaaatgatagctgacttactttaatcagacatcaaatgattaattactagtacatatgataccagaaatgaaatctctctgtatataaagggagatgctacctctgttttttttaattttgtagcagcaacaaaattaagtgttaatatcagcatcaggaaactgaaaggaggaagatataactaactacctagattgccttccccttaaaaagaacataatataatcatggcgattcttgggtgcaaagctaaaggttacttctagagagaaaggatggagacttgtcaagcaattgggtgatgcttaaactatggtgagagagttgtgttcttttgcttgtagagcgacactagtccaaatagctaggtcgctgaaatcaataggaaaggtctgtccgagagaaactccagattaaagctagagtgtggccataatgagtggcacaacacaactaactacttcaactaacctcttccattttgtacccctgatatataacttcacaaaatgaacctatgtagtatgaacttattaataccacagcagatttagtttaggaattctgacatgtatccaataccctctaccctatccgttctcaactatctaaaattcttactcatgtactagtacccaaccccaccagaatacgcaacccaccaattaaaaacaaaaggcatttccagccacatgagcttggcaaaaccacaagacaacatggacaagtgtccccttctagctaccatgattaaaaaagaaaaaaataagagatagagaaaaatattcctcctcaagtcctaatattttgttaggtagctccccctccccttccaaaacttgcgtccaccactcatgtgtggccaagtggagaatccccctgtgccagcttggactctctcatctcacccctttctttgccttgttgctttggttggacagcctacacttaaccacattcccttgccaaagcatcacctccttcccacccctcctatatatgcacaaacacacatatactccgcacaaacacacatatactccacatatccagctgcagttgcctcttctacgctaccaacaacaacaacgacgacaacaacaacaagaaagcgcacaacaacaacaagaagaagaggaggcaacaaggaggagttgaagtggaagctttcagctcacctctgctcccattcttgcgctttctcggagcgcaggaatgggcgcgatcggggagtggcggagggggccggtcatcggccgcggcgcgacggcgacggtgtcgatcgccacggaccgccggacgggcggcgtgttcgcggtcaagtccgtggacgtggcgcgcgccggcgcgctccggcgcgagcagggcatgctctctgctctggcctcgccgttcgtcgtgccgtgcgttggatccggcgtgtcggcggcggtggacgggagcggcggggcgtgctacgatctgttcttggagtatgcgcccggcggatcgcttgccgatgagatcaagcggtgcggcggccggtgcgaggagcccctgattcggtcgcgggtgggcgatgtcctgcgcgggctggcgtatgtccacgccgccgggatcgcgcactgcgatgtcaagggccggaacgtgctcgtcggcgccgacgggcgcgcgatgctcgccgacttcgggtgcgcgcgctggatggcggccgaggactgcaatgccggcggcgtgacgatcaggggcacgccgatgttcctggcgccggaggccgcgcgcggcgaggcgcaggggacggccgcggacatctgggcactcgggtgcacggtcatcgagatggccaccggtggcgctccgtggccgcggtttgccgaccccgtcgccgcgctccaccacgtcgcgcactccgtcgacgtcccggagtcccccgcgtggttctccgccgaagggaaggacttcctggcgaggtgtttgatcagagacccagccaagcggtggacggcggagcagctgctcgagcacccgttcgtcgcctccgcggcatccgattccacatccaaggccgtgcagatcgagcagcgcgtttcccccaagagcatcctcgaccagtgcctgtgggagtccacctcgacggactccgacgccacggtggcgctcgcccccgccgaccgtctccgcgcattgtccgccggcgcgtccgtcgcgcccgactggacctggagcatggacgactggatcgccgtctgcggcggccgcgccgacgaccacgacaccacgccgtcgccacaacccgacaccaccaccagcttcttccgcggcgatgaggcttcgtcagaccttgtcttccccggaggcggtgagctcgcggccgccgccgacggcccgcgcggccacgacgacgacgacgacgacgacgaccacggcgtctcgagctcaccctgcagctggcgccgcagtaacagcgcgattagtggctgtaataatcgcaataataataggtgctgtaactttacacagacaaagcaatggagtatcaagttggttaaaccctccccgcgtccgagctggcagccgatttaattactttcccgcgtgccgtttcgaccgcccgcgcccactttttcaccttttcggcggtgtccttttccgtcacgtgccgggcgtgagacgtaattaggaggctaccactacaccctactccctactagaacaggttacggcctctgacaggtggggcccaaggaagcgtactgcaaacacgagtcggtttagaaattttaattaggcgtggtgtggtactactattagttgcgcctaatcgtgttggttttggttgaattttggcatgaggtttgcgagggggaattggggttgggtgacgtgcaaccacctgggccaagaagtttttgggtgcaggtgagactgagagaggcgccgttgcggttgcggccactgtgccattgatggcgaaaagcagcgagattacgggagttgaacggtcgatcgagagtcgcgtcgcgtccgggtccggctagccaagatggttggttcgttggttggttgagtcgtcggcgtccgttgctcgctgagacccacaccgattcgtccattgatagtttgctacacttgacatgtacccttggttgtacctgagctgctataggaacggcagatgcttttgggcgaaaatgttggtacggttttttctccctctgcttagcgttagtgctagtgttaggattgggtgatgcagtggccttgccttactatgccattatttaggaggaaccaagagtcaagtcgagagcaggaagcaaactggagtagctagcagggcctaaagtacgtgaaggctacgcaatcgatagctatatgttccctaattaaggaaggcccaacagcgattattgagacagtgctccatttctttaaatattacgtataagcttttaattattcctatatagtagtattttttttacgcagaaagtgcacacagccacccacacacacccatctaagcaaactattagggtgcgttctgcagcggtgggagtttcaaagttttagagagtttaatggtacagtaaactttatctctaaatcatttatagctaatctaatacccaattcaattcgtacaacggttacctataaatatgtactacaccattaatatctaattccacatctcatatacacataacattttggaatacgtatcacaattggctataaatctgtagctcatttctcatctctctcttatcttcttcatatatgcttatagatgacttatagtctgctattgtacttgctcttatatatatactttctttttttttgcaattttatttttaagtgaatttattagagctgcatattttttatggtaaatacacacatatataaaaatggttctacactcctcactgtacatcagcaacgattccaaatcaaagctggtacagggtccaaccaccggacctgttttgattttcatggataaaaaaatcatcttaatcagcaacactataattttgacaaatttgatcttatatttgtaacatgtgagatcatgcctttggcgtttaggattgtaaaatttaattttcatttttcaagataaatggaaaattatcctctcttgtgcatcataacaaaccaataattacaaaacttgcttgaatataacacacacagtatctatgtacttttaataaaagaaactgtaacacagtatataaaatgaacaaattaatggtgattagtgaaacacaccattacatttttgatgtgtttcaatcaggttcggagcacccaaatttaggtgccaatggaaacgtcccccttacacataagtagtacagtagctggaagaagaagggtgcctacccacaattgggcgacagattcagctcacgcaccttaatttgatggacacacgcgttccaggtgcgcgcacggattcgtccggttaaaacacaaacatcaccggaggtcggacgacggacggaggtgcatgcacatgcgtgcatgaatgagttcacgcggctcgcgcgcgcgcgcgcgaggcactcttgctctcgttaatttgggccagtgtcacgcacctacttacgtgccgctaatccgcacaacgtacgcatgcacacacacaagggccagaggaaaacgtgcacgcggcgtgaaaacgaccggcggaatcaagcgagaggctagcgtcaagccttccgaattctgatcgatggcgagtcgcgtgcgtgcggtgcggccgatcgacgggcgatcgagtcgaaatggatggatggatggatatgtttggtcgcaagcacactccatgccaacaagtgccgtacaagcctcccttccccccttcccgaactgccggtgattggctgattggaccttttggagtttggactctccactctcgccgcgcacacacgattaatgcgatgatgcgagaatgattattggtggcacatatagccatcgcaccatcacggggttgctctacaatcaagcatagcttcctctaggctctagagcgtccttaccactgttttgtctatctatttcctccatgaataaatttatctttcaccaccttatttgttttaaaataactttatctttcaagcaattagagtttgtagagtgaaagacaaattcattagagcaagttttatagtgaatgatactactatctttaaatttagccatattatctctagtgcacaaactcccaaattttcttttttttttcattttcacactagagatcgtatagaggttgtttcttacatgaaaggtgggcctattctctcttcctcacttctctcctccacctcatcgtttgcaaaaatagctaaagataccttaagtttattctcgcctacgaaaatcgatgttcacaggcgtggtcttaagacgcatgcctaaaaaataacttataggcggacctttaagacaacgcatgtgaaaattgattttcacaggcgagaccttgagacgtctgcctgcacaaagttaggcctcataaaatccacctccggccgagctccacccgctaagtcctccttcccttcactcactcacctcaccctctacccacctccccttcccttcacacccttaccctccaccatccggctggaggagggaagggccacagtggcggccgaggcggcgcagccctcccctccctccctccctcctagatccgaccggaggagggaagggttgtggaggcggccacaacaagcagcggcggaggcggcgctccccttccctctctccatgctcctagatctggtcggaggaggggagcgacggtggcggtggaggcgctcccctctcatccctccctccatccctccctcgtagatctagtggaggacgggagcgatggtggtggtggccaccgcatgcagcggtggaggtggcactcccctcccttcctcccagatccgaccgaaggagggagcgatggtgatggcggccaccgcaggcgatggcggaggcgactctcccctctctctaattagtatattgatgtggtattgttccttacatatattgatactcttcaccacgccgatactgatgaagtttttgttgatattgatgtgactcgtcatgccgatactgatgtgattgccccctgagctgaattcctcgatcgattaattcatcaattcctttcttgttcaaattctacaatgtgttcatcaaaacttcaggttgattgaacaaagcatgcatgatgaattgccttattcactgtatgttgaaatgtttcaaccatcaatatggggaattgagtcttatgaatcagaccctgttgcatcatgacaaaagattgaagacaacacttttaaaaatcagccacaaattgctccacctgttgcttctgttcttctgtcaaattctccattctaaccgggatcttggaatcaacttcttcttcagacatgttggaataaattttgtgtcctaccaggcgtgccaatttatgttgacgtgaaattttgttgtgacacatgaagacctgagagattttcttaactctagtgcatgtcctgaaatatcgggcgtgccagttagtttgatcctacaactgacaagatagataaattgatgattaaaagagccgatcggccaataagccgatgtagcgatactaaccgatgtcgataggattttggacaatccgctatacatccgatgtagattctaacacttagattaggacaatggaagaacttgaacaaatgatctaatcggccgatgataatatgatgaagcagatgtccaatgaaccaatcaatcggccgatattgacatagaatatttaaatgtagacttggttaaagcatacaatggctggaagtccgattaaaaaaattacttatcggctagcactccgataaaatgtagcacaaatctatgaacttaacaagacttaaattattagtagtaatattgaagatcggacctaaccgagatagttgtagattatgtctgatcaaataagctagataagtcgatagatctatgctaacatgatggatataataaatctatttaaaataacattatgattatagtgatgtattggctaagacaaaagatcaaactaaaccgagacagtcacaagtaaatcgatgtgtcacaaaacacgatgcaattaaaggtagaattgaaatatcgggtaggcaaatataccaatcgaaccagttcaatccaagagattgaagcgatgcagccttgaacaatgccgatatagctgatacaatggctagggccggcggaacttaggccttaccccttcaccgaagatagaagcgatgcaaccctgcgtcggatgccatgttccgtcagtgataaaaacctcgaaaaagagggtgacgatgcgccgagagatgtattgatcgagagatattttacaatgaccctgggtgtacacattaatacccatgggtagatactagtctttattggacaagacacagactttcctaaagataaagtaaaagatataagtattgatctaattctaaacaatctttcctaaaaataaaaaacaaaactacctgactctgctaatttcggttaaggaaattaatcaattgcaggaagcttatccagaagcgaccgagttcaagaaagaatcgtaaagactatggcatggcggcataagtttatctattaattagaaaaaaattgttagtttccgtttatctttaggaaagtgtgtttagtgtccgataaggactttatgttttccttttatctttaggaaaatttctttcttgtccaataaggactagtatctacccatgggtataaatatgtacactaggggtcattataaactatcttccgatcaataaaattactctcgatgcatcgccaccctctttcccgaggtttttacttacacgactgaacttggcacctgatgcggggttacatcggctttcgatctccggcgaaggggcaagtcctacgttccgccagccgtagcaattgtatcggctacattggtgttgttcaaggttgcatcgcttcgacctcttggatcattctggttcggttgatatttttgcctacctatttatcatatatcttagttgatctagtttagcatcttaatttaatcatatcggctaagattcgttttagagtttatgctggtatcagctaaattatcttgctagattagattaactaaggtatccaccaccctgaaaatagtcaaagtcttgattgtttagactttatgcttctttgcatacttttgtgatgcatcattactagtcgtgcttagaatcataaaggctaacctgtctttggttataataagagtttcattcgggtttcaaccgatgagttatctggacgttacattggcttacaaggattgtatataagttggttttagccgattgcaacaaaggtttcattgaatatcgaatcttgtggattttatgacatcggatctccagccaaagtatgctttaacatttggattagtgtttattctattatatcattattagccgactagtttctaatggattatattattgttttattatattaccatcagccgattgtctttgtatcgttatctacatggaacatatagccaattgctcaaaaccctatcgacatcggctagtatcgacaatggctggaactattccatcggcttgttagccgatcggctatttgatctattgtttacttatcttctcagttgcaggatcaaactgactggcacgcccgcatctcatcaatattttggacctaaactggagctaaatagaacttccgagccgttgctgttatcgacttagttcgcgccaacatagttctggcaccatcggccgagcgcggatttcccgacaacaataccattgtagcgaccctcgtattccacttccaaggtagaataccggtctacggctcattccttagtaagaattaacttaccgagaaatgagcacaccagagtagcatagcagaaacaattgtagcgaaacccattaaataaaaaccatagaaaatagcttttatcaacataataactaaatttatctcaacaacaatttccaacaatttccaataatgatctttatcttgacttgatactgaccatgctttacttcatatacaactcccgaatttttctccttgctgttcatcttccaagagaaccttttcgacgcctaaagagttagctcaaacatctacaaaggataatatatatatgggatgagtacgaatggtactcaacaagtccaactatagcaatccaacaaatacatgcccataatccacttgcataatacatatatctccaaatcccataatccaacaaggaattttatgcatgttcataaaacagtgtagtaaaagctcatattaagtaattataaaatctactgcatataaagcaccacaggtattagaacctccgataggttcctttcctgccgcgttcacggtttctatccgaaacagggagtgacatatcacaattcgtacactctgcagaggtgtgtcgctgtacccacagatgccttaaaccttttaatgcccacgcccgtcggcgcttgaagcacacttcatggtgtatgccggcaaggctaaggtcacaagcttttcatcaatcccatttggcaattatctctgcgggtgattcccgcaacaacggcgaatcatcggatcccacaacaacggcgatccacatcatctaatcggattccgcaacaacggcaaccctcatcgctagcccacgctcacgggattcgcggaagtccttaagtccgcaggataaagccattaagaaagaactactaagccagcctgtcccattccaggtcatatggtcgacacgatcgctacggcgcttgaatgttatataacagttgttgtttaaccttatgatgataaatatatgcaactgaacccccaccatcatggcaagttcagaatacatctatagtatgaccgactgctccaccagtcaatccaatccatcagcatatttattttaatcatagaaattataatttaatgcaatgtgatacatatagattgcaattacaaaaatataacaagagatgttcaaagatgttggacttgcctgagatacccacaatcgaagaacgaataaatcattgaagaactccaagaaatccaagataaatatccaactgtaaaaatatgacgaattaaaactaaaaccaagaatgtagatattagtatgatgcacatgatatgtctaaccttaatatcatagctgatctacaacactataggttattgactctcacctcaagactcaactagatgaaccatatatatttttaagttaaatatagttaaatatatttgtatgttttgattcggtaaagatctatgatttatataacaaaattggactaaagtatatagtgttaaaacaaacatcattacacttttatttttaagagagtaattatttaaattgaaagaagttttaccttatttgagagagatttatattcaataatcaataataattaaattcaataatacacctatatacagcccacatgtaaaagcccactacaccaccttcttcatcttatctctttttcctcgttctccccttctctccctcacggctcacgctctcccagtgccgccgcttcttaggcagcgccggcgacgccgccgctctccctagcgccggctaccgcgccccactccggcgacccctcaagcagatgtcccgcagccgcgaatcggtttattggctccacgcttctctgcccctaagctaaccccagccaccagtctcctgctgctgctgccgccgtggagatggctggtggaaacacagcgcaactccggtggctgcatccctttcccccataggtgagctacctattccatcctcccatatctgattcctattgtgatgtactagtgtggtgccctctcttgtatggtgttgttatgtaaactgtgatgtactggtgatgtttgtgaacttgtcctaatgaatacttagggttgtatttactggatctagggttcttgagaaattggcttgctaagatggatgatgcctatatgttcatgatgaatgaatgctgacatgaataggcctatgaattgcattactgaaatttaaatcacactaacatcattggtccttatatatgcatacatgtttaattgactgaatcttctgaagttagtgacatactagcaggatcagatctttaactaaaatcttatttaatgatgaagcaatttacatggttccacacttggaatatcatgggaaggtctggactataactaattaaattatcacctatgaaacattatcatgaatacaaattgatggcaatttattcctctatatgctctactgctactgcctcttgtgttctgtttatcatctccatatgctgtagtgattaataacccaatttataaattactttattacaatggttgatgaggacagtaattaaactattggtaaactaattatatatatgcaacttatccagatgctatgttctaaatctaaacagttgctatagactatatactatagaaatctatggttttctactcataatcttatcaccccaatttgattctttttactggaacacactactcatcttctatatctgtatatgcacatgtcaatgttatgccctgtttacatgactagaatctgaaagcttataagttcacatgcatgatttggttcttctatacatgctctattcctaaataatttatgtcatgaacaccagttgattttattcaagaattatagctacatacgcttattgttactattcagatttcttctatgataatttatatatgtcaggatttaaagacatgcatttatctttaactttatcccaaaattttgttacttttattcatttagtattgccaaggtttttgtcaagatggatggtatatatatatctgcatgaaactctagctctaacaaatgctgttaatatgtatgcaggatctactctcctcccctattttaattttttggttacctcggttgattctaccgtgattgaaaaatgtgtggttcagctcctcctccagaactccaagtcttctcttctactgctgctcttctggatctaaggtgattttgctagaactgagcttctccaccttgagcttgactgattgtttcccccctcttgaactgaacccccatgctctacttggaactcaggtaattctcctccttggctcttgctctactggtaatatttgactgcttcctgacatcttccttgatctgcttctggtgattctcttcctcctcttcagactgatcctcttgcttgattttcgctccatcttgcttcttgacctgagtttcatctcttcctagagctgaaacccttcttcatccaagaactaaacaaccctgcttctccttcagatttggttttcctctctctgattacttggccatggttactactactgttggttcatgtattggtttgagctggacttcagttgagctatttctctctgggtggagctaacacttaagctaatttttcctggagcttggttctatggttgtaactactactgccgcagctgctgcttgttttggtttgcacgaccaacccgagacttgggttggaaatgattcacacaaattattttatcaatgataaatattgtactggtgattcacctgcttgcatggctattcccatcctgtacttgtgacacctcaacatggcttgttcggtgggataacctaaagctatttgttaatttccttaattaatggaaaattggtagagtctgaggtgtttgatacttttgcacttgaatccctcaagtctggtaaaattggaggttaccattagtttagggactgatttgtaatttgttctataacgcagggtccctttttgaaatattactaattacacgatatgttctcggctaatgtatttgtacaatatatgaaatgcatactgtataataagattttaaatatataactatatccatgtatgtatggatggttgcaaaactgtactggtcaattgtgaataaagtgctatagcttccatggtgatttctattgtgcataagtgttccgctcttagtgatgactaatccatgctataattcaaccaaaactaaattatcccgctcctcaccatgtttagtctaactaataataaatcaatgattcatattgatatgactaaatgaataaatgacaaagaaacaaccgagaaaccatttaatatccaaaatagaacaaaaaatcaatatatttataggtactagccaacatcgtggctcaatcaacaccgctctcagctggtgtgatcaagtcattagcataactaagactatagttaagacgtgggatgttacaatcatgatccatgagacacgataattaatcaatctatgtgctgattattgaactttatttgtttcatatatgatatttgatcaaggatcctgtagaaataataacatacaacataaatagtcttacgaacgaatcacatattcattagccaataatgagttatctatttcgagtaacaacacatgataatatgtagatatagtatgcggtataatcatctctatgattatctttagagcatatcattaacattaacttaattaaacttgcctaacatgatgtgtgacaacctttgacaagctttatgatcgaaccaaagagctcccgaagtcttttgtactatacaagtagggattcgtgttgtgcaggaaggttttgctttgatatccttcgtttcgttgcgggactcttttttgcagcacgttgcctcttcatccctgtgatgctccgactcccctcctgtctctgcgcacgcccaccacgccagcggtgtcacgccggccatcgccttttcaccttgaggtgtttagatggggctaaaacttgttagttcctgtcacatcggatgtttggatgctaatttaaagtattaaacatagactaataaaaaaactaatttcataaatgagagctaatccgcgagaagaattttttaagcctaattaatccataattatcaaaagtttagtgtagcatcacattatcaaatcatggcgtaattaggctcaaaagattcgtctcgcgaattagtccaaagttatgaaatgagttttgtaattagtctatgtttaatagatcaaattagtgtccaaacatccgatgtaacagggacttggaataagtccctgattcccaaacagccacttagtcatccaagccgccaccgccgtatgtactccctttgtcattagggtaattttataatccttaagaaaataatgggaggtacctcattttctaggagaaaatttgttgtttctatatactatgtgtctcaagataagatactttcttaagaatcgtaaattttctaatctttaacttcctctgaatccgtcttctatccgatgttatccgcccactagggatgaaaacagagcggatagtttccgtccgctctggagaaaaacgaatatggatacctttcggatcggataatttttagatagttcggatacggatacaaatacggatattttctccggacacgaatatgaatatggtaccggggtttccgtctaatatggataataattcagatatccaatgaactgagctattcggatatccgcagaagccatgagacataccctatttctttataactctatgaccttcaatatacctttttagattttaatagtagttcatcccttaacactagtccacactattaatattatttaaaattttaaaaatatttatagattatactacattttatataaaatgagctaattatatatgttgatatttgtttctattgcaagttgagttggttttcatgttccgagataaaaatgtttccgtattcgtgtccgatcatatacgattctaattcataatcgagataatccgtatctgagcatgtagctagatgtcatgcatgctacatatagctgctgctgctgcccttttggtttacggcatcaccaagaatacacttttttgaaaggaaatcaccaagtatacacttatttacatgatttattagcaatgcatatatcttgcgtgcaatggagcttaattatgcttggcatcagggggacacttttgatcatctcacgacttggatagaagaggcgagacggcttggagttggaggtgccaagctgacaatatgtttcattggaaacaaatgcgacctctctgatagacgtgctgtcagctacgaggaaggtgaacagtttgccaagcagaatgccctgctctttattgaggcatcagcgaaagctgctcataatgttaacgaggttactatggtttatcctcggtgcttatttgtgcaactaagcggttggtatctgtaacaaaattttcattaatttgtggtgtaggcattcactctgactgctagagcaatgtgccacaaagttgaagatgcatgggtttgtttaatgagaaaattcgatccatagcacagaaaagaaagcggtaccaaaaaatagcacaaaaagtttcctctttcgatccatagcataggccaacgatttttcttcgcctggtagcacttccgtcgcattttgaagtaacggcgttagatcggagtggagaaaattttcgtcagattcacttgcccttcgttccccaccaggtctcctcttccgctacctcgtggacagcggcgcggtgaaccatcggtgtgctgggcgaccgcctcgtctccccgccaccgtcgagtgagctgcgggcgcgcacttcaacgacgtggacgcgtggctcgccatcgcagtcgacggcgaggtggccccactactaggaaaagcattatcgcaagcggccgaaaagggtcttcgcaggcggggcgaccgtccgcctgtaagccaacgactgtgaagatcgccaatcttcgcaggcggggcggctgtccgcctgtgaaaataattttcgcaggcggacgttggctagtccggtccgcctgcgaaaataggaatcggccgcctgcaaaaaaaaacttccgcctgcgaagataggtagaaaatattgaaatttaataataatttgcccataaattacttttaaattatttaatagaaattcttgtaggtagattattatgtacatatattggaagattatcaagcatttggtactgagaaatctacatatattgcataactcaaaagtgttgccaaaatatatatattacaatatttttttacattgtcacttcaaataaggtcatctagttacattatggcatagtagtgttccactcccgaagatccttgaattcgtcacttgccgctagggtaccctctgggtcgaagaaatctcctttcacatgacagcactcatggtggatgaagtggcacatatcacgttggacatttgtgatacctgtatcgtcaaagcttgtttgacattctaatcttggcaactgcatgcattgaagttaatcaatatattagtatcataaatatgtgaagctgtctagtacatagtatagagacttacatcctccgcgttagtcctgtaccgtccattaaccctaaggaattcgcacgcataatacccgcaaaggaccgttcctcgcggttgcttgtgacacttcaggacatatcatagaaaaaagtagttaaaatttgcaattagtgaatcaattggaatacattaagtgagtggagtattaccggccaatagctacgtactagcagcttctctcgtgttcgggtctgttctccacccttgaacttgtagtattggtatgcactgtatggatgtcgtactgtttcacagtaaggaggatatttatttataatacattcatatacaaatgcaagagtcataatcacttactactgtaatcgagagggtccaagactaacatggttccgtctttagggtggatgagtaaacagatataatgatcgctacatattaacaacagtatagttagttagtaccagctaaaataagacatatgtgtacaagataaatgtaccggacttacttaaaattataagcggccatgacgactctcttattttgaaagtgcaagaaggctcgtccaatgtactgtgcgacagtaatcaatttctccatgtgcaagcccttcttgtattctgctatctcttttggattcttgcccttcagctggtcagaccctggtgctagcctcactgtacgctgtgtttggcagatctgagttggatccaagaagccgatgggttcttttttcttcatagcatccatgtattgcatcctacagaagaagtttgttagtaacaatcacatggatttgtattgtacatatttttcatctaattaattaaaactcatactcacatgcaccaaataccgacgtagttgacgtccatcttatcccgacgatatatggcgtggagatctgagaaatctagccatacgtaaccttcttcgccgaaacaatctaccggtgattgagctgttatattgcccaagcctttcttgctggcctccatgtagaaggtatgtaacctttttatctcccatggtccttctttcagtgcctattccggcaagaatgctttctcatgttcgtacttttccgagcaatcatcggttgcgaagtatgttggcccggctagttcagcagccttctaggggtcgtcatctctgagcttggcacgttccttaccccctctgaagacggttaccatgaacttctccttgttctcatctttggacttggagttgtggctcctaagcactcgtggcacctcagaactggtagtggccttctcagggaccgtggtctcttgcacctcggggtctttcgcaggagaagagtcttcaaatatttctggctctgtaccgtcccattctaatcttggtacttcttctatttctgacccgactgatgccacaaattgcacctctggttctgccactgtaatctccatgggcacatccggcactggaatctccatggctgcctccggcggtgcaatctctatggttgcctccagcaatgcaatcttcggtggcacttccggcactggattttccttttgcatctcgggttcctccgctttatcagtcaccttcctcttaggaggtctctgaggttttcccaaccccggtttaggcaccacaggtttttgagtcgcgtcggtgcccaatccaaaggatatgtcattcttgtgccagagaattacaagatcgaccgcatccccaagtacggatacaccatctgcagtcgggaagtcaatgtcgtaggactcaaacccttcgtggaccacttgcgactgcaccttggcatacgcatcgggtatgaactcttcattgtatgttctcccaaggatagcaatggctgtagcggcctcaagagttttcccggagcgtctaatgggaacgtgcaatctgcagggtgtattctccttgaggtcatcgaaggggtaatctggctcaggttctttggttttggggcaaggcaaaagcatgtgcttgacacagaaatccatcatttgcctttcaaactccgtagcccctttgtctctaagtttatccttgtacgcttcacggttcttgtgggggtcatttttgaacccttccttccaactcatcttgctcgacacacctcgaacccttcccccatgctcaggagtacccagcgccgtacttagcacatctttctcccttttaggcttgaaagatcctttcttttgtgaactggataaattttctattttatcggcaacgctctgtagctccagattttcaaacgatacttttccttcatccgtgatcttcggagttctagctcttacccagttccttgatctctgtgtccactcctccattggtgccggttgccccttcttcctcatttcctcctcctcttttgtccactgctccacctttggtgcatatctcgcggagcctaagcgatgaggaaatttgttcttcttggccaactctgcatacttttggctcctttgaatttcttctggggagttcttcaacgtctgaaagttgtcccactgattcggggttatgttggcatacgtcgaaaatggtgtgcgtcccgtcttcacaaatttcttgttcaaggtggttttccaaccactccaagacttggccattgtttgcagtgcacaattcctcactgctgtctctgatccatccgggaactagaagattttcttcaactctttccataggacttccatatccccattcgatacatgatcccagtccttgaccgtgatggggatcttttcccttactattaagccacactgtgaacagaattttgcacgtgccgtcttaggggcgagcggctctcctttagtcgaaacatgggtaacaacatggaacccttcatcctttctattcacgcttctctcgcccttccttttcttctcttttgctgaccgttcgcttttctttgtgccggttgtgttagctggtacgtcgtcgtctttcgacggaacttttttcttcggctgccgttttgatcgccatggcgccatttcctacgagaaggtatacatggaagtttcgaatttagctcgggctaatagttatcacggtgaacattttacatattaagtttacttaccccttctttaggggggatgtagtccttgtcgccttcttcactgtcgccctttttccttctcttcgggcttgggcttggacaaggatcgcttggcgacgagtactcctcgtcttcgtcagctacgtcactgtcggaactaccttccggtgggaccgttggttccggagcaaccacaacagcaagggactgctcttgctcccctaaacccttctcttcagtccctttagtactatcggccatcgtttcaaacctctaatataaaaaaaaagagttatcgcccacattttaaattactcaaattagtacaaacaactttgtacaaaaataaactgtatattaacaatatgtcgtatgaacaaatttaaattctctgagattcccaaatttaactattatactaaattaattagtacaaacaaatttaaattgtgaaatattattaattagtacttactattatgctaaattaattaatacaaacaaatttaacttgcgaaactaattactacttactattatgctaaattaattagtacatacaaatttgtacaaaatttgatatgttattatcaagtagtgcactaattgacagttacatttcatcaacatgttgattaaaaaaaattgaaaaggcaaacatatcctccacattttttttaaaaaaaatgttaacataccctcccacatgttatttaaaaaatttgacaaattcacatatcctgcaaaattgaacataccctcccaatttcattcacatatcacccacattcccaaattcacattcacaatcaacatataacccctcattcacatatcacccacccctcatgccaattcacacccacatgcacacacatatatacccctcacacccacatgcacacacatataaaaagaaacacccacatgcacacacgtccgtgttcgacgaacggccgacgacgagcttcggtcgtggatgacgaaggaagggccgacgacgaggttcggccgtggacgacgaccggcttcggtcatggacgacgaacggccgacgacgaggttcggccgtggacgacgaccggccgaagacgtcgttcggccgaggacgtcttcgctcgtggacgacgatcggccgatgaagccgttcggccgcgagcgagatagagagagaggtggctgccggcggcagtggaggggcggccaacggcgcggtggaggggccggcggcggtggaggggccagcggcggccgcgtgcgcggtggaggggccggtggccggtgcggtagaggggccggtggcggtggaggggccggcgggggtggagcgagcggcgtatagctcgcgcgtggtggaggggtcggcagcggtggcagagttgtggagctcgcgcgtggtggagcggcggcaaggggcggcggtctcggtgacagcgcgcggacaacgacggtcggcggcggcggaggacgatggtcggagagtgaaggtcgcaggcgggcggtggcggagaacagcggaggcgaaaaaaattcggcaacctgatggcgccaaaatttctagggttcccgcctggacatagaaattttggcgccgcgggcttgcccttatatagggcaatgatcttcgcaggtgggtggtccgcctgcgaagattgtttttactatcttcgcaagcgggccgtccgattgcgaagatgtaaatcctactctgtataacaattttcgcaggcggaccgcccacctgcgaaaattggtacagagttgaatatatttattccaaaatatacaaaccttaatattattacaaaatatacaaaccttagtattattacttttcaaatgtataaatagtaattgcacataaaaatattactaatttaattttttaacaaattttttacactacaaatggtaaaaatggtaattgcacataaaaataattacacttttcaaatattactaatttaaattttttaacaaattttttacactacaaatggtaattgcacataaaaattagtacaaactaattaatatgcaaaatgtttagtacaattgttcgtcaatttgcgatataaacacacatcaccttacataccaccattacataactactaacttcttagatgcttacatgccactcaacaatcattaccctttaacatttttgcccacaccgtccgtgcgcatgtaaggcttcacggtcttctgagtagatgtctcgacattcttaatcttctgtacaaacttactataaagtggcatactatcatattggttgtaatcttcgacatcttcaaccccatccactcccaatatcttttgtttccatggtaacactatatctttcttcaaatttgaagggtctttcacataaaacacttgtgctacgcgattggtgagtacccaagggtcatccttgtgacccacactcgccaggtcaacaacagtaagaccaaacttatcaacattgaccccgttcgggtattttacccactggcacttaaatatggggaattgcattgtgtgcccatagtcgatttcccatatttcttcaataaacccgaagtatgattgtttttccccggcttcatcaattgcttccacatggacaccgctgttttgcgtacaggtcttattatctcgggctcttgtgctaaacgagtatccattaatgtcatatccctgccaagaatttactatagttgatggaccacaagccaaccgcttcatagttatttcattggtagtttgtccctcaggtaagtctaggtctcgcaaccaatctatgaagagacgcttgtgttctttcattatccactcggtggtgcgacctttattgttagctcgtattagttcgatatgttgatcgatgtacggctcaacgatagcaaactgatgaagcacgctgaagtgagcttcttggaatgatttgtgatcatgggtgacgaatctcttctttcctttcgttcccctgccactcaacctgccctcgtgtcggggcacaggtactccaattgcatatccatctttgaggtaatcgatacaacactcgacaacctcttcagtactatagccctcaaccattgatccctctggatgtgcacgatttcggacgtaacccttcagaaccgccatgtaacgctcgtatgaccacatttgatggaggtacaatgggccaagcgcaaccatctgtggcactatgtgaacaatgaggtgctccatcatatcaaaaaatgacagagggaaacacatctcaagttggcactgtgtctcatgtgcgaatatacggagatttcctaactcttcgagactaatgaccttctgtgacactgtgttgaaaaagtagcacaaccttgtgatagcaacctttaaatgcttcggttttatggcccttattgcaattgcaagaaacatggtgagcaagacatggcagtcgtgtgaattataaccagatacccacaaatctttcattgaaactagtcgactgatgtttgatgagaaacctatgggcactctgacatcacggagtgagttgcaaaatgacttcttctcctcaggtgtcagtgtgaaacaggctggtggaagatatactttgccattcttttctccttcttgagggtgtaactcttccctgattcccatctcgactaggtccatccttgattgcagaccatctttagtcttcttcggcatctccaacaatgttccaactatgttgtcaaacacattcttctctagatgcatgacgtctatggcatgccgaacctccagatctttccagtacgggaggtacttaaaaaatatggaatgcttcttgaatgggggagggagtttatcatctggcttcgaactatcatcttgcttcttactatccccttgtttcatattcttctcggatttcttgagctttgtcccctttgatggtttcttagtcatttttccaaactcgcaaacaattttctctgtcattgcacacaccttttctcccgatgtaggtttcggtgcaggatcagtctcttcagtaccatcgaactccgccttcatcttgcggtacttgtgatttgtgcgtaggaaccgccggtgccgcatgtacacaagcttgttggaacccgggagatacctatagtacgttccattcaagcagatcacacatcctgttttacctttaatttgacctgaaactaaaaacattgctggataatcgttaatggtcacgaagataatgaccttcactgtgaagtattccctttactcgtcccacactttcaatccctctttccataaatcaaccatatcttccaacaatggttcaagaaatacgtcaatattaatactaggctgacggggtccctgtatgaggatacagagtagtacgtatttttgcttttgacaaagccagataggaagattatacatggtgagaagcactagccaagtactatgtgagctgctcatgtctccaaaaggattaactccatcagtactcagggcaaatctaatgttccgtgggtctttagcaaactctctatactgagcatcaaagtttatccactgacgagcatctgccgggtgtcgaatcatcccatccttcttgcgcccttcttcatgccagcgcattagttccgcatctcgcgggtttgagtatatccgtttaatgcggtctttgacaggaaggtaccacatcacaagctgcagaatttttctctgtcgtccctcagttgcttcagagggttctaggccagtattgctattcaacttgtaccggcttgcaccgcatgttggacattcatctaaagaagcgtactctttcctgtatagtatgcagtgatttacgcacgcatgaatcttttccacaccaagtgaaagggggcatatgagtttctttgcttgatatgtgctggatggtagtgagttagacctcgggagcattttctgcagaagttctaatagactgtcgaaactggtatcagaccatccatgtctcgcctttaacctcataagttcaagaactgaccagagtgttgtgaactcactgtcacagcccttcgactcatcgtacaaaacttcctttgctgccttctataaagcttcaaagttatttaaccctctagccgaccccatcagcacctcgggttctgcatgacataacatttcctctaggttgcatgcaccatgtcttcaacttgtgtcagaactacattttcaggcccgtccacttgttcttcgccatgactgtcacgcccggaatttctatccaaaattccaaacgcttacatgtgtgtgaaccctcgtccaggaatcagccgaggcacacaataacaaattgataatagagtacaattattactctaattaataagcgaataaaatgtcattacagaggtagatagttcctctcaatcaataaagatctaagcagtggaaaaaaaaagataaacggcgcagacgactccactccacagatagcttgaccagggctacacctaatcctccacaccatcagcatcactgtagaactcctcctctgatgaatgattgcaaggtgagtatatgacatactcagcaagccacgcagcaaatatgcaagtgcacaggataacaaaggatggcatagtagggtttcatttgcataaacaacatttaataaacatttcagaatttaataaaatagttaagtagtaattaaacaatattaatccaacggtatacaacataccctgttgcataggcccaaccattctgaacaaccatcccggctgcacagttctatctccaaacccggaattaaccattccaaaccaggagctaatcaaattattaccagttatagcatctgttattatgatgagaagtgtgaaactaatcacgaaagacattgttagacccgcccataaccgcgggcacggctattcgaatagttttactctggccagagatgtaccactgtacccacaagacatagccccacgacatgtcaccatgtgcctcaataccaccacggtacctcagaaaggagctgtgatagtacccctcacacaacacaatccaccacagcgcaccgttcctggatcataatcacccccttataaacaaggcatggactccccagcgacccccgtgggcttatctccgccacttctcagtctggtgccccgcaatgaaccatgctatacaaaaggtaaagccgttgcccacgctggcttgtggttggcatggttaatgtttcacaaccgaaactcgtgaaccagtccttaattgttatgagcacgaccatcaaaaccacgtgctcacaacccaccattatcaggttttagttggcaaattaattaattaaccaatcatgattaaccatcatgagctatcattaagccatcattaaataatagtgagtcataagttatcccaatagtgtactaatgtttctaagcatggctaagcaatcatatctaatatctaactgaaccaatatataaagctcaactagtcaagttataataacccaaggtatcaaggaataaagtaatcaagaacaaaagagctataacaaacaataggttaattccacctaatgacattcgaaaataaatgcaatagttgaatagaaacaatagctttaaacgggatcaacatgctcaaagggttgtttgggatctgtgtgacttgccttgctggccttggaactcttcaaattcttctcctacgaaaacggactctccggaaacgtcggaatctaaacagaaaggagcaaaatcaccaaaacagcacacaaacaagcatgaacagtacatgtggatatttttaacatgtagatcccaattttagaaaaatttagagtcttgaaccaactaaatccgagccaagatgaattagttatgaattttcaaagattaaatcggattaaatcatttatttagattttaattgaattatgacgcaataatgaattatttttgaaaaggaaaatggaattattgcgtcagcggctagggttcgcggtgaaccgggtgcacggcggcggctcacggaaacgaacggccgagatcgattcatccaaaaatgaacggccgagatctatcggtccatgaccgggccacggggaacgacgacaatgacgtcagcggtgacgtcaccaccggtggcggctcgggcgtgcatgcttgccggcgaacgacggcacgacagcgcgaacagagggaaccaacatgtagagggcgacgcggcgaactcaccggtgaccaaaacaacggcggaagatcaacggatggcgacggcgtcgaggaagaagcggcggcgaccttcggcttgacgacgacggcggtgttccggcggtcgacagcgacggcggaggggcggacgaggtcggcgacggcttggcgatcatgatggtgacctcctcgagcgacgacgacgaccggagcggcggcggcgcacggctggatgaacggcggcgacgacggcgctaggctacacggtgctagggctctaccggcgacgagaggcgaaggcgagggtggcggcgggtagcggtgggcttgggggtccttttataggggttaggaggcggcggcgaaggcccacggcgaccggcgacgcgaagaaaagtctagggttcggaggagagagatcgatccgaatcaaactcgaattcacggatttccaaacgattttagccgacgattccataagagaaaagatagaggagatcccgaagatcatttctcctctattgatttcaccggaaaaggaaagggacggccgaattggaaaggcggcggcggcgcggcgcggctagggtttgggcgcggcagcggcgcgaggaagacgaagactgacaggtgggccccacctgtcagcgggcggacgcgcgcgcgggcagctgctgccgaactaggccaactgggccgagcgagagagagaggggttttgggccgactttcggcccaaagccaaaagagaacttttaaaaccttttccaatttaaattattcatgaaatgcaattccatttattaaaaatacttccttagctcaaataaatcccagaaaaatctaggaattatagaattaagcaaagcatttaatgaaattttatctggccccattttatattggaatttattaattaaaactagatcttctcttctaggcttttaaaataaattctaataattccaatttagacaacaatttatatatttgggatttttagggtgtgacaatgacgtgtccatatttcgtacttgtccataaatccatgagttactaagtgctccttcactttaaaagcatcgtcaaagtcccaggctatttcattcttacagtcagcacatggacaaattatcttcctcatattgttcttatcagcgtgtgccttggcaataccaataaatttagacacttcgtttctatatggagacaaaaaccttggccaacgatacatccattcccgactttccatatctctaaaaaaatacacgtaaaatatttgcacggttaataccaaatttgtagggtttattgaaaaaacttatcgctattcaaaactaattaactaaaggttaagtgtaaattaataaaaaatcaaagtttatttcaatttttttacacagacatgcctaattagtacattaggaaaatctaacaaaatcatatcatcggcatattacaaaatactataactattttttgattgcaccgaataaatagacattaaaaattttattctctctctatatatgacaagatctagatctagatctagaactaggaggtggatgtgatagcaaaaataaaaaaaaattgagaatttatgttaccacattaaaccactgcaacaagaggcatcgagtattacacatacatctaacatcaacatatcaaaagaaataaaattaaaaaacatggagctcttccttcacaattttgcatgcataaatccatcacaaattaaggcctaaaagcttaaaaaattacatacctagtgtggaaatgagtagatttaagtaccgtagaaaaatcccccgaagatttgaagttcaaaacctccccccctatatttaagtcactttaggagagagaaactttggggagaatgaacagggctcggggaggaagaagactatataggggcatcttcgcaggcgggccatataagcggcgcctgcgaagatcgatctttgcaggcggaccgctccctccaccccgggtactttttttgccggcggggttttggctctgaattacatgcccgcatgagaaaatcgatcccctacgacgccgaaaatgagttttctagtagtgaccccgtctggcgctcggtgctgctgatcgagggcgagcctcccgcgtcggcggctgcttgacgacgaggacaatgatgatgacgtgggtggccctagcgtcggcgtggatggatgtgggccgttgtacgccctcgggctccgccagtggtggctatactcggcgctgcaaaactgcctctcccttgccacagcaccgtgccgcaccggcttgccgctgcttccacgtgatgatgacgatgacgatgacagcgatggtgacggggacgatgacctgccgcttctgcaggcctcaccgttgcgcttgaggggaggctgctcgcaagcagtcaccaccaccgtctgcgcgcggatgagaaatttggaatggatgagccgcgcacgagtgtttaatggagacgaggcgctgtcggagagctacgaggcggcggcggtggagagcagtgcggatatcggcggtcggcggaggccggagcttgcatggggaggcaaggccgagaaagatcagcggagtcgccacggagaagggaggaggaggaggcggcggcgacctatctgagcagatgagggcggcacggagctcagggaagaagggcaaatgagtcttttttcatgccaactcatatgtttggatggcaaatgtgacgggagtactatgaatcacaagaaaattggtgtcttgggctttttgtcaaaatgaaaaatttgttgtgctattttttgttaccaggtttttcatgtgctacgtatcaaattttcttttgtttatttgaagaggtcttattgctttttctaagacccgcttgaagttttgtggaaactgaagatttgtggaatcgccagtagtttcaatgataattgaattaaacactttctgtcgtaatgtccttaatgtgccacatatatgcaatgttatatttttcaaccctagaaaagagctcatctttgcacaatacacctggcatcagtaaagaaaaacccaattcgtgtgttctgacacatttcttttatttgaactatcgtgcgacagacagaagtagaagatgcggagatagaattgcttgattcatgagtgagttatggggatctaaaacatgtagtttggagatcagaacaaatcttgtccaagttatgtgggtgcatattctctatgtaccaatataataatatatgactcttcaatttggcatttgaccaaaattaataaccacttcattttcttggtgtgaaggatggaaatagttttggggaacttttatagtagtagtagtagtttgtactagtactactagaagtagaagggtactagaatttaaatttaaccgtagattttcacaggtatttaaaaacattttatttgaaacttcgctaaggtagcttaaccaattcatctattttgacatatatatgtcatgtgaatttatcattataattacatatttcaattcgaatttcaccaccttcaatttcttagtactcccatgtgtacactcaaatgcttagtacacaaaacaatagattgaatagcctctatggttttgagaatttatacccccatgcctggagaaaggaatacttcgttcataatgcttcttctcataccgtttttcttatatttcgtaattgtttttggctcctcaaaaaattaacacgtgttgagcttcattaaaaaaaaatcctcatctatatatatgtaatctttcatcggccctcctaccgtcggacacctaatattccttatgcttgattcacgagaaagatatactctctctatcaactggagtaaaaaggtagctgtattttgggattgagggagtattattttattttgaaagagaggcagcacttgctttcttggagtgaccatttcttaaactatcataatttgtactccgcatacatcaggttgtttgtctagattttacagcacggtgttttcaaatctggctaccttgccccaagctgattgttgggaaaatcgaatttttgcaatgtctacaccaccacggcgtttagcatgtgtagtcaaactgccgctggcccgccacaagggtctgttacaggttgtacagaacatttgtaatcggcaggaacgctgcaagagatgatttcgaattgtcaacacttctgcgcatctggtatttgcaagtacttttctgctaatggcttgtttgttctgagtacgtatttgcaatagcccggccaaataaaccataatgcctccagaatcagcatctgcacgaccaaagaaagaaagcccaagcaactaacacaaaaaggaacaaacacaagtttcttttttttttcttataagataaggcttcatcaggaaaatgcaaagtaaaaaaaaattaaatcatgtcatgaaagaagggcctgtaacatcatgacacgggtctagattatagaacaccatattggcatacttccataacattttaaacatgctgaagaccctctttataactaaaagaacaacgtggtcattttgtttttggattaaactacggcgtggaatgtcaataaaatttcggaaagaaaactcgtcctaggaagcaatagctagcagtatgcatatcagttcacgaatcacgaactgctagactgcaaggcaacaagggacgcataagctccaccgggcaagcgcagcagccgcccgtgccggccttcctcggcaacgacgccgttcttgatgacggcgatcttgtcggcgccggtgatggtcgacagccggtgcgccacgatcaccgttgtccgcccgaccatcaccctgtccagagcctcctgcacgatgcgctccgactcagagtccagcgcgctcgtcgcctcgtccaggagcaacaccttggggtccttgaggatcgcccgcgcgatggcgatccgctgcttctgcccgccggagagctgcacgccacgctcgccgacgctggtgtcgtacccgtgcgggagcgaggagatgaagcggtgggcgttggcggcctcggcgacagcgacgatctcctcctcggacacctgatcctgcttgccgtaggcgatgtttgctctgatggtgccgttgaagagaaccggttcttggcccactagccctatctgctgcctgagccaggtgagcttgagggtcttaaggtccatgccgtctagaaagatggcgccagagtcagggtcatagaacctctctagcaaggctaccactgttgatttaccgcttccgctttcaccaacaagcgcaacagtctgcaacagaagatcaaacttgtcatcctcagaaacaatttcagtatcttcacaaaaaagaaaattcagtattgaatggatttcattttcagttcagattctagtaacatttcgacaactattaaaattcagcttgtggtgcacttctttgtttacttttgttgaagaatataattcaactgttctgtgaagctactgtgcagctattcaggttacttgttaagttgttattccctctgtttctcaacatttgatactttcatccacgaacagagaacaaggcatcagttatattgaatggatttcattttcagttcagattctagtaacatttcgacgagctattaagattcagcttgttctatattctaaattgtaacttgtggtgcacttctttttacccacacacagagaataaggcatcagttatattgaaaaattgtgacaaaaatgctcctaggatgcactgtataggataggccacgtgtacaacaaacccaagcaagcactgaacaaaatggcaggccattcattcaaatttcagaacaaaccgaagcaagcacccaaaaaatatctgtggaagattgttgggcccaccactatagtttcgggggatcaagggaaaatttggaatttcaccatgggaaaagggtacttgcgacaaatattttgaaacaaatgatttagtcaaaagtgccatttattaaagaatggagggaacaattgttaccttgcctcagttctgtagcaatggtttcaacattatagagttattaagatgaaattaggagcaaattgatggtaattatgagaataaagaactgtgaacaaattgctttaccatgagaaccacatgtaccttgccagatgggatcctcaagcacaaatttgtgaagatctgcacgtcagttcgagctggatacttgaagctcacatgctgaaactctatattcccctcaattttctctggagccattccatcatctgagcttgcatctatcttggatttcctatctataatcttaaaaatggaggctgccgcatcttgcactttgctaaaatcccgagcaagagaactcgattgtgaaactccaacagccatcattgttaaagcaaagaagacctgcattttcaataagcagcaaaaaggatgaatagaggaaaaattgcagaaatatgcatctatcagtttcttgagttttaaccttaaaaacttccccaacgtcagctgttccattgtgtacaaagcgtgctccgacataaaacgatacagcataaaagcagaagagcaaggcaaatgagaatccataacccacaccacttatagctccctgacggactcctttcttcacaggacctttgcatttatttcggtagctttcaattatcttctctcctacacagaatgaagtgacagttctaatgttactgatggcatcactagcaattgtgctcgcttgttcatacatttcctgcaggaaaatatcacaggttttcagcaaagaaacagcataattattttattgcaatgaaaaaaaggactatatgtatacctttgcatcagcaccaaatcccctcattaaccttgattgagcataactctgcgcaaatacacagggaacgaagcacaagactatgaatgctagcttccagtttgcaatcatagctattacaatgccgacaagagcagtgcttatactttgaacgatcaatgataaaacatctccagcaatgcttttgacggatgcggcatctgcggatagcctagcacctattgcgccactgagtaattccagtaatgcagaagaattaggtaatggaaaggaaatggcaattgtataatggcaatataccaaatgataatacctgctgttcagagggtcatcaaaccatccaatatcctggtaaacaacccgactaaatgataaggcacgtatacgctcgataagcttcccacctgccatgttgaacaaagtgtgttgcactggtatgataaagatggatacaacacccaagatcacgtatatttctgcccagaacactgaatcttttcgcagtttgtgtggtggttcatagaatgcgttgatggcacttgaaagcaacaggccaaacactggaagtatagctccattggcggaggcggcaatgcatcctaacagaaggattgcagtttcaggcttatgaaggtgtagtaagcgcctaagtacattcttgccagacttcgtgtcatcacacccttcgatttcatcttcagtcaatgcatatgtctgtgaattccttctgcttccacccagtgacgaatgtctgctcatagatctctcaaaggatagctttctaatgctatgtcgacttacaaaatttccagcatcagatagtctgttcgcagcatcagatagtctgtttgcaacatcagatagtctgtttgcaacatcagatagcctattggggtcaagttcataagttccattccttctcgcgtttacctcttgaagctgtaaaagttgatagtatgctccattggaatattttatcaactcagcatgaggtcctgtttagcaaacattatttttgagcttgattttgatctataaatcgaaattgaaaacttgctgaatttgtatggcaagagttttgaagaaaagtgacaaagatctctgttaccttgttccacaagttgtccacgatgtagcacagatattgtatcagcatttctcactgtgctcaggcgatgggctacaattatggtggtcctgttaaccatgatattattgagtgcatcctgaactacatgctcagattcagcatcaagggcgcttgtagcttcatcaagaagtagtatcctagggtccttcaaaattgctcttgcaattgcaattctttgtttctgtccaccagatagctgtgtgccatgctcaccaaccattgtatctagtccctgaaaatagttatcacttatgatcatgattcatgggccccaaattaagatgaaataaatgctaaaaagagatcgcagaatccataagtcaaagctaaaagggcagaaagagaggggttgtttgaatagatgagtgtacatttggtagcttatcgatgaacttcgcagcattggcaaggacaattgctctcctgatttcttcctctgatgcatctttctttccatactctatattttctctgatggtagttgtgaaaagaataggctcttggctgacaagccctattttctgtcttatcctgctaagatttagcaatttcatattaacaccatccaaaagaacttcacctgattgtgggtcatagaacctttcgaccaaactaatcacagtagatttcccgcttccactttcaccaaccaatgccattgtcatgccacttggaatgctaattgagaagccagtgaagatcagttgctcaggccttgcagggtaactgaaatggacatctttgaactcaacatctccaacaaaattctccaatacaaggccactcctatcactggcatcaatctcaggttccctattgattgttgcaaacattttgtaagccgcaatctgtccagatgcaaaagcatttaagcatggagaactctgaccaagtgccctacaaaaaagttgtaaaataaaaaaggagctgtactgagaatacagaagtcattgaagttcatatttttgtgtattcaaagaattgttgtcatgcaaatcaagatactaacattgcaccactcatgatggccatcaatacattaatgatatatcccccagtataacccttttcaataatcagctttgcaccgtaccataccgctaacccatagctacagaaaacaataaacataactgaaccaattccgagtcccatagccgcgccctggtgaacagctgatctatatgatatttttaagaattcattgtatttgtcagttgctctcctctcaccagtgaaagataccacctgtaaattttcacaacgaaaaattagaaggatctgaaaaggtttaggaaaaaaggataataaaaaatgttgaatttcttaagaaggtttaggatattacagttctaattgatcctattgtctgctcaaccagcttccctgcttcagcataggccagctgggaacggtttgctagctttgatatggcaattgacatggctgcagcagcaagtgcaacaggagggatacttgacaacataactagggacagaagccagcctcttgcaaatgctattatgaatccaccaagaaatgttgatagcagttggagaaacttacccaccttcataaatggataaaatttgaaatctgtcaaacaatagattcacaatatagcggttttatgcatcatatagaatcagtcaacttcagtcagtcaatttcatatagtaaaaccaatctatataaattaaaaccataattaatggatgtgcattacacaggcaggagatcatctttgaccttcagagatccaggccatatgaatgattgccagaaccatagactggcttaactatgaacttgctgcatgatatgttctaaggaggtaaaaccgaaaacttaaggtgttcacatagcatgaaaaaagaaataccaccgggatggggcacttcacagagctgataattaatatgtagagaaatgaatactccctccattccaaaatataaggcataaccacccttaacccaaagaccaagaaataattattatcacctcattgtttgaagcatcctaataaatacaatgcatacacccaatagaattagagattttgagagtgaaagagttaaaaaaataataatttagtgaaaaagatgtgctagttaattgcatggatgcatgcatgcttatgaaacatctaagaaaaatagttgtgccttatattttggaatagagggagtatgagttatctcactttttctccaatggcatcttggatcaacactgtgtcgctagacatcctttcagtaacttctccggttgatgtctccaaatcaaagaatgtaatatcttgtctaagtatcgcctcaaggtacagcccacggatgcgtgcagcttgcctttcaccagtcaccatccagcatgacacctctgcaggtacacagttaaatgcagtctagtaaaaataaactttaaagcggaaataggatattacattacataagaaaacatctgctgtttatatcatttcaaatatattacagaataatgactgtctatgttcactgttacatggatttagtagaacaattaagttttgtaatctctctgttgtgcattcttgacttctgatctcatacctataccatgcagtttccaagagtattagccattattcacctcaaattcaggtgaaaaccaaatacatatgaagcaaacaaatgcacatcctttaaaatgcaaattggacaagcagtagtttaactagagctattatgactgggcaggctttcctacaccctcaacagcaacggaaattctaccctcactttttttccaaaattaacttgagaatgtctagagaattagttgctagcattgagacaaatgctgataatccaagcacatctaagatgcgtccctactaaatatgactctataatttggttctaaatttcaacagttcctaagaagtcacctgaacaggactacatgagtccacattctttatagaaaaggaagaaatattcgtgagtaaaggtatcaaagaattattcatcaacaatgctactaaggaaatatactagagttaagcaaatagctttatctcaggaagtctttattctctaccagaatagatattgttatacaataatacttttaagaaagatataatattctcgaaacttacgaagaaatcctgctattccagagccaattgccacatatgtaaatctgagagaaatctgaaaatggacaatatagaaactaaaaaggttaaaaggataaagcaaataaagcaccaaggcagcagctggtcaaagaaattaaatgaaactattcctgcatattgaacatcttagttaaagatcagaaacagaaatgtataaaactacaattataatgcctgtgagtttcagacagcattaggcaacacgtaattacaactttacaacataacatgcttggaaaaaaacaaaagcatctgcacaaatacttgtactgtatcaggcaattcctcttgtacatcctttggagaatcattaattaaccgttttaaccgaaaacaaattatcccaacagtaatgcttgttttggtggggaactcgttttctcttacatatgaagtagatcgcacagaaacttaaaccaatttcaccataatgtagtactaccatcttaaataaacacgttagaagaaattagtctaacgatttgaagaaattaactcactgaattaatcttcaacaaactttgtactcctagaaaacttgctacgttgcgtgtatctaaactttgtgcaaattcccgagtgtacgaatcggctcgaatttgtaggcatgcgtggcaaaggcacctcctaagtcctaatctccataccagtttggaacaaatcgttgcaagcataattcatattcaggccttgcacgacaaactctcataaatgctgtgattaagaacagatttggtaaaatagcatccaacggtgcattttcgacagattaatggaaacatggagagaaaaaaaaagagaacgggaacttggaaggaaaataatcacgaatctgtgataggctggcgatccatcaagagaactttcagttggttcgtcgagtcccacccgctagtttggtttctccgtttatcaaatcccgattcccgaatacttgcagaaggaatgttcttattccaaaacccttaataaaccctcttgaaaggaagaaaagaaaaaccccagaaactagtggcccaagaacaagaatcaaaccagacgaatgcgaatggaatcgatcgatgccccaaaggaagtaaagcgattggacaaaatgcgcacaagaagagagagagagagagagagagagagagagaggtcgcgcgcggaaaccttggagacgacgtgcacgacgtgggcgcggtcggcggcgccgaacgcgtcgacgagctcgccgatgaggaacgcgaggaacggcatcgccaccccgttcgccacggccgccactccccccaccgccatcagcgccgcgtccagccggtccgcgaacgtgaacagccgccgcatcggcaccctcttcgcgccgccgccgccgccgccgcccgcacccgctcccccacccccatcgccgccgcctccccctcctccggccatctacctccgcggtacaccgatcggtcgtccccgcttcaccaccaccaccactccaccacctcctcacgcctcgcctcgcggcggcccagggttgttggtgtgctgcggcgcgagacctggaacgaggtggtggtgcatgggcgtgtgcctagtactgccccctggggctctcggtggggggtttttctaagccgatgtcgttcgtcctcctccgttcccctctcgtgtacgcaactgcgtgtacgcgtagcaatgagccgggtcggggggttgttttgcgccgatgaggtggtggtcggagctcgcttgtagggacaacaacattggccccgattttgaacgggttcatccgtgcatgacgcatcgaggacgcatccgtgtaaagtaacagctggtggctctagcctttttccaattttagcaatgacggtacgagggccatgactatgatgagcagggagtagcaaaaacactagacatacagcaaagactatatctgtatacataaacactacactgtctttcattatacggtatgccgtttgcctccttatcctcgtccccgtcataagttacatttgccacatctctatccactatcctcaattcctcatccagttatttacaggtttacgtcttcctttgctcgtgcgtgtttagctgtcatttgcctcatttttcccgtcctcatccccatattggtaggtattcagaggtgtaggtttcaataaattctacattacaatgaattgaataaattatacatcaacagtgcataaacttttcaggtgagggcaatatgaacttggtttctgttttatctttatttgttgctacccatttattattacttgattttctatttctttctttatgcaattattatgtcttattctatgttttgctgaataaatgtttgtctaggcgatatccttcttacatacgggtttacatagcaatcaaatcaacaacaatatctacaagattaaccttaccgtgctattttggcctgagctcgcacggaccaaacaagtttgtgtatcaaaacaaacgtttttacaagttcatacactatgctgcacccactgacaagttcatgtatgctaatgcaattttatcttttaaaaattactccttagatcacaaatttttagtgtacgataaggattcaatccaactttagttttagccattgattttgaactaactttatatcccgatcccaactattataaaaattgaagatgtttataccgaaattttggtgcgtcgccattgtcggagcccgattactgtttgtgcatttcgtttccatatgcattcggttttcgtcaagatactggtcactccccatggtaggaaagtgaatggcatgtgctgggcctcttctccccacggttgttgagggtccttaagtaccaaatccgaaaatcaattcctgcagcaaagcaaatgaaagaatataaaatgaagtacggaacttagaggtaatggttattactaaccatttccacaagccttggtgaatatttgcatgctggtgaattatggaagaaaaccacccaccatgcgacaaaaaacacctccaaggtacaacatgtttacgcggattggaggccccacatgtcaatcaaaatcacctagaattgagcccaaccaaggtacaacatgtttggggtccaccaggcagtctcctagccggaggagcggccgggaggtgggtcagaagttcggcagaaccacaaggtcggctgaattgaccttggctccccttgccatctgtttcacatgtaggttcctgataactccccaatggcggttatgcatggttcccggtggttcccaggcttaaccgacctttaaaccttcattacaatagtaaataaggaagagagaagctctcactctcaaacataaaactcaagtggagtacaactcactttgatatttaggttactctctagttgagttagaaaataggtagagagtgaggggaagcttcggaataaattggaaggattgccccagttgtccgacttctctcggggagttctggagatgttggcactctctctagtggagtcccggaggagtgccagagttgtcgtcactctctcctccgacttgtacctcggcaaatgctttcttcaataaagtaagtattcgagatttccttagggtatttacttttcttgtaagatagcttctcggcattgcaggttcatcgcttagtatttatactgagtgctctagtactaagactctggataaagaaggaagttcttggtcgaggctagagtagtaaccgataacgtagatgtggtgtctaggttagaagttacattcgtttgttgtgtactccatggaaagtgaggtagacggcatgtagtgacaactctgtctgtccttcatattcatccatgtttcggtacatagagctataggccgaacttagcttggcagaccaggggagagctggtgcctgaagcaactgatagagttgtaccttaacttaattaagataattaacccataggaatcctttctattctaagcataccatttagttgttttccttagttgaatcctgatcttagattataccctgtgattcgatacccttggaatactctaaggtgaggtgctacaatggtatccgtgcgcttgcagatttttctgtgaccgtaacaaataccaacaagcacttctggcgcatcatctttgaacttggttcatcctcatatcttttctgtattcccttctcttcttacctaccatggagcatatatccattcaaaacctttctgctccaaagggtgagttttgtgagttacctccttcaaaagcaatttgttcatctagctatgaagttcgtcctggctttatagccatggttcgggaacaatccttcccagagcgcgaaagcgaaaatccctaccattatttgcaagtgttcgagcacttgtgttcatgtttgacaatcacgagcatgacgcaagataccttaaagtggaaattgtttcccttctgtcttatagagggacgaagcaatggtacccccataccgtgagaaaattgcatggtgaatgggaggaattaaaaagcaggttttgcctgactttcttcccgttagcccatgtagtctctctacgtacagaggggctcagcttccaacaaaatgagaaggaattcattagtgcagcctgagctcggttctccttgtaaactcaggccagcccagacttgtctctacctgatcatatgttgttacaacactatctgcttggatttagacaaggagtctgctatgtatctcgatacttccgccgaaggttcattcgcacacaaaattacgttagaaggaaggaaactcttgggtcgtatcctggagaacacctctttcgttcattgcaaaaccatcccgaaaatcgaagatacacaagaggaaccatcaaccgtcgaatcagagcatacatcccccatatccaaagatctgacagttgaatcctcacccaaaccacggacaccggaggaagaagaaattcaacctttggagtttccttttatattctaggatgatctatatgaaaaccacaaaacacctcgaatttcttctggcacaagaagcctacgacacctcctccttctcccgatcctttgaaggaactttttctcaacgaaacctcgaagacataatggtagaaggaaggtggatgctcttccgaagcaatttagattatctcgccctccacatccattccttattctttaaggggagttgccgtagaagcccttcacaatcccactgttgaggctagtatcatgtataaaatcctcgcaaacattctcccgggcggcttgcctctagccccaactgacaaactcttcaagagcccctcaggatccatcttcgaatgtcgtgggattgcaagggatgtgccaatcaacatagacaaaaccgaggttcacctagatttccacatcttctcagtccttgatttcgatcttctcataggttactcgttagaagaacttcaccgaaaaaggtacttctcaagggagcctcgatgaaaagattggggaagccgctttcaccagctctgcctcttgctcagaaaatccaatggcaaagctccatcccgagcataacctgattgagaatgtgatgttgtatgtttgttcgcatcacccaatcatgttttgtttaagggcaaaaagcttttcacctaagaagaggacgaatcgggaaatgagacggaacgattgtcatcacccttgatcaagtttaaacctcttccctctggcccacacagtatggtgttatcaacgacagtcaaaagtcgatcatgatctttcctgctaattctctttggagggagaagtcctgggccatggaagaactaaaggagctgactctagaattcgacaggaagggctatttagataagcatgaaagcttctttcttgaatatcaagaaccttgctctcttaaggtatcttcagagtctgccacattttgtgccacgagcacattgaaccaccttaaggtcctcaccggaaaaatgtttaaaaggttggttgtagatgcatttgtttatcataaacattgcaaatttcgggttgcacctatggcactaaccttgtagctacaacttcaacgatgaatcaacaattgatggtgaagctagggactacatcaccaatggtggctgcaacgtaaagattccccatggtcgagctttcgaccataatcaaagcactacaggaggtagcacgtactatcatttaccttcattaatagaaacaagaatatgtttttaggataagtttgccctcgagttttttttttggtcactaaccatttcaggttaagattaaaaagaatgatggtcatgcgatgcccaagaacgcgggagatacgtcaattgtagcacctccatgcttttgatgatggaacaagttctgaaggaggctggagcaccgcacacttgatttttggtgtcttgaaacgcaaaaaatccaagtgtggggaggttggtacgtatctcataagaagttccatttatcccaaaattccactttggtttagagatgatgtttgttcttgtattttgccttgctgaaaaaactttttgttttgaaaaaaatggtttgaaatgtcatgcttttggcattaaacaaaaccctaccgagaggtacccgaagttcacgattcaaatactcatgtttatctccatttgaatatgacttgatcatgctttttttaatctattatcgtattctttggtttgaatgaatacacaaagtccattcataggttgtttaaattaagcatagtgcttaggttacaaagtcttctttaatcaaattagacatggtgtcgagtttgcttaatgaaccttagagttagtgctggtatagatcttggttgtataaatgttataagtctttaagctgattcaaattggagataacccaaggcattggcaaagttgcacaaaaccctcatgtgttatgttgaggtaattttaattcaacattgtttgagtataagaaattggttgaaaatagttttttttagaaaaataataaaatgataaaaaatgaaaggagtccatagattcttaggtcatgcagggttctatcgacgctttattaaagatttctctttggttgctagacccctaacttgtctaggatgacccctttaacttatttattgatgagtgctcattaccatttaaacatactgaaagaagctctcatcatctcagcgccaatcattcaacccattgattggaagctatcgtttgaaaccatgtgcaatgctatagatcatgcttttagaattgttcccggccaggcttaaagtgagaaacaccatgttattgcatatgctaataaaattttgattcaagctcatttaaactgtgtcacaattgaaaaaaaggggagctctttgccgttgtttttgcttttgtagcatacccaaaaattagaatttcagttttttgcatctaaaatttttgaaaacaattttcctaaatggaaattctaaaattttctatctaaagacctagatgagactagtctaacttgtacacataagaaaaacttgcaaataaaataaaactttctccattgctaattcaaaatgaaatagaaaacataatatagacttgcatatacatagtgcattgttatggcttgagtctttttgtgtttttggatcttacgtgcatagcatactaggtctcatggatgttaattaaaaatttaggcaactaatttattttaaaagatatttgtgttagctattggaaaatcattatttaaattatacaacttaaaaatactacaatatgacctaggtccaaattcgtaaaaactaattttgtaacattcatataaagacatgccctgcttataaaattccataaacacattaactcatttgaatttcattttactctaaagtgtgtcacttaaaggtatagttttcataacataattattaaatacacacaaataatttatgatatgtgcatggtgaactaaaagtcaatcctgaaaacatcaacacaggtcaaatctctactattataaaaattgaagatgtttttgctggtactttggtacgtcatctgggcatgagtcggtttttaagtttgttcgtttttggaaatatatatatccgtatttaagtcggtttttatgtttgtttgcttttgtaaatacaaaaggaatcgtataaaaaatctctttaaaaaaaactcgcatgctaacttgacatgactgcactccaaattgcagctcatgattttctatatatatatatatatatatatatatatatatatatatatatatatatatatatatatatccaaactagttctcgtagtagatttcaccttaaataaaatgtataacaataataaaattaaaatagcctttacccgttgcaacgcctggggagtttttctagtataactcaaatataacttttacaatcatttatttgtatttactcaataggaacaagtatataaacataggtttggtgaatttctaaaactaattggtgcaatataaaatcatggaacaaaattcacatgagtactatccaacatgcacaacacactgtaattttgacttaattttctcactaagctttgtacctcaataataaatcatctaaaacaacaaactctgaaaattacagattctctggagcctattttagctgtgttgataacttggggttgggaacccatctcttccacacataaaacatggctgtccattagcgcgcgattaattaagtattagctaatttttttaaaaaatgaattaatttgattttttaaacaacttttgtatagaaactttttgtaaaaaacgcaccgtttaatagtttgaaaagcgtgcgcgcgaaaaacgagggagagtggttgagaatccatagcaccgaacacagcctttggcactatcccaaaatttgaccaaaatgatttttatgtgaaacttggtccaaagcatagagtaagggttatactacaaatttactgttgaccactgtattaatataacaagggcaagtaattaaacttggggtcaaagttggaacttcaccactgtcacagggcaatgtgggacccactgatcagccccgcgcccccgcccacgacaccccagcgcgtagcacgtgcgagacacgcagactccccgcgtcggagcgccgctgagccgccctctcctccatttcgtcgccgaccactgtcttccttctttacgccctcttctcatttcacggaagagccgatacaatccatccttgattcgccgagaacggaggcatctccatgactccatcggcgccggcaagttttcccgctgttgccatcgccatggagccatggtcgtctccatcctttccgcgttccgtcatccctcttccatgccgtttccattccttttaactgcggttcaatttgtgtagcaaatctccgggaacgccaccgtgccgacgacgcccgggagcgccccgtcgtgtaggacggacgggaccacctcaagccaaaccgttgcgctaccatcatcggctcgccatcacggccaaaaagccctcaaagaccttcaagattgacgcaccaaggacggagatcgtcgtcaacttcttcatctctggatccggccgctgagctccatcgtcgattccggccattccggtgaccccccgtggagattatggataccccatacctacacgacatgtatatccgaccgggtatggagtgccatgtataagtagaatatctttaaagggacctgggttaaattctaaacttgtatgtcaaggaaatacccgggatcctagtcggttacgattgtatcatatctgtaactacctattccgttagggatatggactgtactttgtaatacagaccccttcccctatataaggaggggtccgggtacctcttggggcgcgattttctcctagatcatacaatcaataatacactcggcggttcaatccccggacaggagtaggatattacttcttctaccctataattcaccaactacctcttacatcctttatacttcattcatcattcatcaaatctaacggatagaaatcatcgaatccaaccgctcctgttgccccacgtctcccccgcctccccttctcacaccccctcactcccgaaatcacgccgcatccacccgcctctctctctctctcgctcttctctcctctctctctctctctcgcactcacccgacgtcgccccacccgcgcgtcgccgattccccatacacgatttctctcctctcccgcgccgcccctccatcgtcgtcgcgtgaagtcctcgtcgccaccgccgccatcgaatcctgccgccccgccatcgcgcgtgactcggctgccatcgattccgacgccccgccatcgcgcgtgacgccgtcgacgcccctccatcgcgccgccgtcaaatcccgtctccagatcgacgccgctggtgcccctcactccaaccgccatggatcccccctcaccctcccatcctctctccgcgcacgcccccgaccccgcaggtcgcagacgcgacgcctccctcttcctcttgcacgcgccgccgccgccttccacgtcgttgccaacggtgaggttttggctcttgtgcctttcatctccttggcttattttttgttacattgttgggttgatttggtgcagaattgggatccacattaggcttttgttcatctggtgtgcgggcttttaggaggtttttttttgtggggtttgcctttagggtttttctggggacaaaaagttgaggcgaaaattcagttcaggctcgacagtcatgcagttgaatgagtttttatttcatcatcatgtaattccctacgaaacctattgatgattgtgcaatttttagagctaatttcttaatatctttgcagctgatgaatgcctcattatttcaaaacaaaatacatctgttgatttatctttttttcctttagtttctggatggattgccatcggaaccttagcttatatccggtcttcatggaagaaagtggtttacattaaatggaagagagtagtatacctttctacatattggtcttccagatgattgtgcaatgcagtcacgagttccacctcggtgagcacctttctagccctccttgtaattttttttagtctctttgtttagtccttgcaaatcgtaggctgacatcgccgtgatacatttatcagacctgatcgttatgttctattctttttctttttttttctttttgcattggatcaacgtgacgacacttcataattagggatcagctgcattatacgggatcacgataacagaatctatgaatcgtcctaatattaacttatcaatggctattatgcatctgttcaaaagtgactgaaataaagataaaatagtgcataaaaatgaatatatactgtgccagggatagaagtttcagtttttttatgtgttttgtgtgggatccacattgttcttgatttcgttttggtttcaagtttgttggtgcatgtgcatgtatatgataactattgctcctctatgactgggtcactttgacttgcctgagagcttaagttttaaatccacttaaatttgttctgtggatcctttttcccctgaaataatggcaactgcagatcaataatcagtgcttaaactattaagttcatttatctgcacactttgttcttggaagtcataacattaaattcacctaaagtctgcatatctttgttgataggcaccaactacttccaatcaagaggattgccgtttagttccttgctacttccaatccagagatggtgccagtgatacttgctgcttcttgagctcttgctacgggtgcaagcaatggtctactcttcctgtggcatataggtatagcatatactctgcattttgatgctttgcatacgactttactcattagtcagtaactcaatatattcgcttgataattttaacatttgatatgttccaagacttgacggagtaattggcccagatgattagcgcttcatattttcagatgcacatgttacttccaaaacatatatgtacatatatatttatacttcacatctttttatccggtctgtacacaactcaagatatctgttttgggagctctacaagagtacggtcaagatatctgtaataatggtcatcatttgaataaaattcatgtcgttctttacattgtgaattttcgtttgtgtagacctgggcatatttggcttactttcagcaacagaaatagagtagatcaatgatggaattgcattctactgctgtcccaaaaggtttttgatcgacatcttccagttcgatcagataatggcgtttgttatgcctaaggggctataccatgcatggtgttatcattaccatattttccaagttcttgacaaaattgatgatgccactgtataccagccaccaggtgctcaagaaatatgatgatgcctcacaacaagattatctatgagacatcagaggtaaaatgaaatgttctgcttaatattgtcttctttgtttggtaacggacgtggcttatagccatgtttgttttatgcatgttttggaatagttcacgatagcatttctgttagtaagatattctttgcataatattgatgaaaagtgagcactgcagtctacaattcaacaaatgaatgattttgtaccttcatttgcatcgggatgaggttaaaataatgaaagtttgcctcattgtctaattctccggaaataaagttcaggataaaaaactgaaatagaaggacgtttgcctaattttcgcagatttaggtgcttaaaatattttactgtctaatgtctgaaatttctattgatgaccagctgagctccattaatgtttcacatgggcatttctgttgaaattgctgtgaagttcacctataccgtttagctaagtgtgatggtggcttacactatattttctggttataaattatagaggacagaaaaggcagttatgtttattatgcaccttcattttactaaaagttttgcagtctcaattgattgggacacttggagctactttagctatttggcactgttttaatttgggtacaagattacagattctaactggtcctgtgctcaattttctgttattaatgaactgcggttgacaatgagtgatagtctttcttagatttcacatctgaaattaaaatgagaaagcactgtgcactccacacagttttttctgtttaaaaaagtctgaattgtatcacggcgagcatttaaagtaacttgatactggtatattagtgaagtgtattaatttgtgttgctgccaattttaatacaattctcctttgcacagtttaaatcatgttaagaatctgcagccagatgcttatggaacttttttttaatgcagggtatttttggaactaaacattcccagtaatgtcttttttttctctttcaagagttgatgcgttaaaaggtctccataaagatgctaagctaagtatgttttctttacgaaattgcatatcgttgcttctttactatgcccttaattcagatagcccttaattctttactatgtccaaaattcagattagccactttttactatgagggagttttaaaatttagatagctgtggagattatggataccccatacctacatggcatgtatagtccgactgggcatggggtgccatgtgtagatagaatatctttagagggactcgggttaaattccaaacttgtatgtcaaggaaatacctgagatcctagtcagttacgattgtattttatctgtaactacatattccgttagggatatagactgtattttgtaatacgcttcccctatataaggagaggtccgggtgcctctaggggcacgattttcacccagatcatacgatcaataatacactcggtggatcaatccccggacaggagtagggtattacttcttgattaagaaggcctgaacctgtataacattccttgtctctaaacccatccacttttctagcttgatagccacccccttttagtattgccgaaatcttgtttcgacagttggcgcgccaggtaggggtagcgtcaagttcttcgccgactagtgcgatcggtttcatttccggcatcgacgactttgtcttccctcccgggcaggcgttccgattcggcagcctcgacttcatcaccaatgacttcggcaagatttctctcctcgactcggattcaaaccagtcgggaagaggccagatctccgccccgttcggtatcccgaactcggccgaggtctaccccaagatcatctccaggcgcagcagactctatatcattcatgagaccgagctgtacaagaaaagtccatcgggaatcctgcaacgatgtgtctttggaggagggaagacaattgctaaaggacatacatttgggcatctgtggcaatcacgctgctgcacgaaccatcgttggcaaggcttatcggcagggttttttttggcccacagctgtgtccgacgccgacaaaattgtgcgaacatgtgagggttgtcaattttttgcccgacaaactcatctaccggctcaggagttgcaaaccatcccgttgtcttggctgttcgcggtttgggggctcgacatggttggcccatttaaaaaggctatcggtggttatactcatctctttgtagccgttgacaaattctccaagtggatcgaagctaaaccggtcattacaatcacggcagacaaagctagagatttcttcatcaacattgtgcaccggttcggggtacccaatcggatcatcactgataacggcactcaattgacaggcggagtatttaaagatttctgtgaggacttcggcatcaaaatttgttacgcctccgtagcgcaccccatgagcaatggacaagttgaacgtgccaatggtatggtacttcaaggaataaaagcgcgagttttcgaccgactacatcaatatgccggcaagtgggtagaacagctgccgtccgtactttggtccctgcgcaccactcccagtcgagatacgggccagtcaccgtttttcatggtctatggagcggaagcaatgttgccaagtgaggtggaatttgaatctctacgatttcgtaactttagcgaggagcgctatggagaagaccgagtagatgacctcaaccgaccggaagaagcccgtgaagcagccttaattcagtcggctcggtacttgcaagggatgcgccgttatcacaatcgtaatgttagatcacgagcttttttagtcggcgacctggttctgagaaaaattcagactacacgggatcggcacaagttatctcccttgtgggaaggaccgttcataatttccgaagtcactcggccaggttcttaccgactcaagcatgaagacggtacccatatcgacagctcttggaatattgaacatattcgtcgtttttacgcttagacattacttttgtatttccctctttgactgctaacatcaagtttttccttgaagttatcagttgggggctactataataataatggagtgtgatttttatcaattcaatttgcttacttgatttatcattgccttgtttgattttttggcttagtcaatgaggactgaaagtttttaacaacttttgcgggttctaggctcaataaggtttaacaaaagcttttaagaaatcgggagctaagtttgaaatatcaagcacagcataaattcatcagtattgtacaaattgtgcctccattcatcatcatcatcattgttataatacaacatcaatcagtatcagtcttttcatcatcagaattattagatccagtcggccggaggttgttgtcctggaatctctcaactacatcaacggctatcttatcggcagctttttgcgcattgttgatgaggtcgagagcggcttcttcgcttgtcccgtctgcaaagccatcaacggcgtcaatgtcaatcttcgggtacaaggacttggtcattgccaacgccaagctcgctcccatacttccagcttccttgatattcttaaaatatgtatccggagcaattctcagcttgtcgaagatttcggaagcatcaaatgcactcggaccattgttattgaagaacatggcttggacgagtggtgtagcggcattggcgacttcatctctggctccttcaagctttttgattttgttaactaggacgtcgaattgagcttgggatttgatcttgcggtctacacgaataagtctacatcaatgactaggcatgaagatgagagtggtttttgaagtattagttaccagtaccttcgacatctttcagagccgagtccctttgtcttgccaattcggccttatctttctccagagcttggatccgcttttccagctcggatatcttggcagcttgcactgtattgcttcttgttggttgatatcacatggatggcagcataagtaagttagacaaagattgtatttaccttttgatgaaccgttcagttcaaagttggagtcttggagatcggcgatccggtctctcagatcatgctcagtcttcctggcgagctccttagcttcgtgcagctggtttctggtggcctcaagggttccaagatggggaactaatttctcaagagtcgcagtcttcgcctcgttcctgagatggattctctgcaatgcaaatttatccgtatttgagcaaagcggctgacaggatggttgaagctgtgtacaagaaaattcacatttacgaggcgagtagcttggtcgagtgtctttttcagcaggcatacttcctcgtcttccttttgcttatttattacaattccctgtgggtgcatgtcgtcatcccaccacttgactaaaatgggtgggcgagaattttcagccgattgtatccggagaacctcttcttcatcaccaatcatcggaccttagatagtcatgaataatgagtgaagtaattgaagaaagtttgtcggatcaaaacaggttcggaggatatgtttacctgtgataatttccggtcgaggacgagtctgtccttgcaccctaacaggagaactagttccagggctagcaccggtgtctgtcttgggagggctgttagcttgagcttctacttctgggatatctttatttggttctgtacccgactggtttccagtcgggggctcctgatcagcaccgactccagctacggccgattggtttccagtcgggggctcgttgctgggttctacattgtcggttgccggttaattgtcactcgggtgatcttctgcagtcggcccggtttcttttgaagggcccatatctgtgtcagttggctcagggtcttttccagaaggatctatgtcagatggcttcctacaaatttgagttatgctatcagtgctatttcaatagtgagtgagcagcaatacaaggaacaagaacaaatgatttgtacctggaggatttcctgattttcggcataggatgactggaggttttcttcttcgggttagcttgccttggctgtttctcagtcgcacttttgtcgcttgccttttccacatcgttgccctcatcgtcacttgaaaccaacttcctcttacgagaatctggctggttagtcggcttcgaggtgttgggttggatgttcgactagatcttcggccctccgctggcttggctggtttgccgacgaggtgagcgtcgttgagcaattggaggatcagatttcatcaaagcaaattcctgtgcatgatattccaagttttcagttgaccttacagaagataaaagcatgctttgggaggagctgagttgtataatacgtaccggtggaggagggttgaaggcattgtatggcacgactggcaataagtgtgaatagctgaccacgaaggcatttgagaatattttgtacattctctcctgcataattctgaactcaagagactctaggtcctctcggttggggtcatgcttgccgtcgaactcgaaggctgttctggatctttctttgattggggccagccggctcttgataaagtgccgagtgatttgttccccttgcaggccctgttctttaagtttcagcatcctatccagcaagtcaagcgcttgggcagcttcttctcccataggaagtgagttccaagtatcacgatataccggaggaagacaagagtacccgggaagcgctggctcagggttttgtacatagaaccaatttgcatgccagcccttgtttgaggttttgaaaggcatggaaaaatatttttggctcaaggttcccctaagttggaagccagccccccccaacaacacatggtttgctcttgtttggctggggcttgaggaagaagatgcggcggaatagagcaaaatgcggcctaatccccagaaaagcttcgcaggcatggatgaaattggcgatgtggactatggaattggggtttaggtgatgcaggctgatcccatagaaatccaaaattccctggaagaagcttgaggttggaagagaaaacccgccatagaagaaatgagaaaataccacgatctcatgtctgtcaggggttgggaatgcttcgccgcatgctggacgccacccaatgatctcctttgccggaagaacaccgtgcgccaccatctccttcaggttctcctccgttacatcggagggcgcccactgactctcaaagctctctctctctctctctcttccgccatggatgcgatctgaatgatgcgatttgctttggaaatggctgacaatggatgggggatcgatgcggtggatgcgcagatgatttctgtggagttttgtaaggtggatttgagcgaattggagaaccctagttccgctggagtggttttgcactgtagcaggaaatggggaaagtggcgagagtctcggcggggaagacgaaacgacgctctgacttcggcgtttatttcgctagggtatcgggagtgctaatgggcttgggcctttacaatacttcagcccaattctgttatctgcgtggctaagttgtgatccgtagggacttaggcatttttgcttcggcaatttttgctcacaacagcatggcccaatgctgttaaaatcctttttgacgtagttagataattccttggaattacaacgatgcaaataaaaaggtacccgacagaaaggtgttatactacttttgtaagccttttttaggctgcaaaggctgtttgggtttttgttgagatgattggtttttgaacagttattctctcggcatgctatatgcttgatttgattatggcgtgagtcatagcctaggctatttcgactcattaattgtcatgatatcatgtttatatcacacttgatggatctttttgagagttttttctcagattcttgtcatatgtgttgatttatagacctttagagtattttttactcgggcctctttatatcttcgttcttggtatattaaagctaaagcagtcggctgtatgttttattaaacattgcatatgcttagctgtacggtactttgggtaattcggttgtaaaaccactcggatggatattatttgcaattcgactatatgtttagcctttagctattcacatagtcgggggctacacctaattaggtgcatctattcgatgcacctgattatttatttttagcccttcacagtctttgattttggtactcgggagatcaatgcagaagaaattgaagcacccggattatcatttttgcgctctgagagaaggatatttcgtggactgtaaaggtctcaggggctactgtggagattatggataccccatacctacatggcatgtatagtccgactgggcatgggggggtgccatgtgtagatagaatatctttagagggactcgggttaaattccaaacttgtatgtcaaggaaatacctgagatcctagtcggttacgattgtattttatctgtaactacatattccgttagggatatagactgtattttgtaatacggaccccttcccctatataaggaggggtccgggtgcctctaggggcacgattttcacccagatcatacaatcaataatacactcggtggatcaatccccggacaggagtagggtattacttcttgattaagaaggcctgaacctgtataaaattccttgtctctaaacccatctacttttctagcttgatagccaccccttttagtattgccgaaatcttgtctcgacaatagcccttaaatctttactatgcctaaaattctatacagatagtgtattttgctccatacacttttgccttttcaatgattaaaaggtttatttttcacaccctttcagattcagaaatcgctgggtgatcttgagggtatatcttccaaataagtggaagacaaattaaggtgaaattaggggggggggctatgataactagaggtaatttctactctgatcttgaaatggactgcaagaacaaaacatgagcacgtgctatggttggaggaaggacactttatatatcagattgcttcataacataaatacttatttcttggtgcttgaaggaccaaaccacctcatagtaaaaagatgctgatctattattgagttgtatattcaaacaaaaagaataaagttcgatgaaaaacagcattaccttggtttttatattatgattcttagctaaagtttggtaaatttgctcatgttttcagcgattcattttatttgtaaatggactctggttttttttggtacaacattttgtattagggaaacaatgaaaagcatttttcagtgacgtggatatacaacatttgtaatatcaaatgcgaccgtagcgttagcacgggtatgttactagatagattagtttagttttaggttaagagaatagagaggtgaaaacacctcatcaaagtttgagcccaaatattggttcaggccaccttgtacacatactaggcaataaggttgtcatttgttatgtgtagttctacaaattcaagcttgtatcatattgttgtaggcaaggttaccgactctgtatttgttagccatcttggccttgttttgtacatgttgagaagattgagaaaattttcaattgacgtttcaagaaactgctggttcaagaattgttctcagtgaagatacattgttcattgttgcatgtataacttcacattttggcattttctgttgaaactcaattagtacaaatgttgtttatgagacctctgattcactaaatgaggtgcatttctgcaataatattggtgttgatgcggtggactgatgaaagcgaatttattccttagaaagaacagcaaaattacttctgattttgcatgtttcatcttggtcaattagcttcagttaatcatcatctttagtttataatggtcattttcttaaaacaattgttcccaactcttactactattctgcttatatataattgttgatggttttcaattaattttatctgacaatatgattttttatattgctttacatatatttgatatataatgtgaatagaaataaagctcaattggactgattgagagtaatccatcctgccatcggcgcttactcctgtgctcaatgggagctcaatgacgtgaatcgaaatatttttatagctccgtagcgttagtacgggcatattactagtgttaaagaaggcctgaacctgtataaaaaatcctagtgtctcaacccatccactttttcagcttgatagccaccgcttttagtattgccgaaatcttgtttcgacacccccgctgcgactttttgcataggaagcgtccctaagacctcgctaacaacgtgtgaccacatgcatgccagtttgatttgtagatcgagccgtcgacaaactcgacatctacccggagttcatcctctccgccgggctgtcttctccatactcgcctctattcagacctgtccaagccgccactcaagcttcggtgagcttcccaccactccttgataccacatgcacgcatcgttttggtcaaatgaagctaataacttgaattgctttggcagcctcaaaaccgtcgccgctcgcactgctgccggcgtcgattccgtccatccccggcgacgaaactaccttcggcgggttcgcaagaaattcctctacaattcttcttttggttgcgtcggccgaggaggcgccgttcgccgtcgggatcgccgaaaagtagcgccggccagtgagctcgcctctgctgctgctctccttcccaagcctatgactggtggaccccacttaattaagcctaagaactgttattaggagtagtttaaaacttataaggttaaatctgaaaaagcacttagtatgacatgtgggcccagaacctatatttgtaaataagaaaaacaatgagaacacttaataataagtgtattaacacgtgctagaggagtgcgggttgatttcagggttttccagcggcctttctgacaaaataccagtcactggctagtggaccccatgtacctaaaatctggaaaaataaaacactcacaattataaaatctatataaaattgaatataacacattttgagatgaaaccaatttttatagattcacagaatcatgatatttaatgttgtaagctaaaactgggcccttacagcatagtaaatagctttaaaagttcatatataaactagatgacataaaacatgcttgaactttagaaattcacaggaaattcatattagttccaaatattttgaattcagttttgttaggctaatagaaccattcaattcaattagcaaaacaatatgtaatacactttgtacaaaagaagtctctaaaatctaatatatgaaattgttgacatataccacactacaacttgtaaaatgcataataaaatagtacaaatgtctacacttatgtttgcatctatgtcctaggttagagatgaaaaaggttttaatttatcctcaaattttattcaggttcaagttagattgaccacacctaggttaaaatgtaaatttttggctctcaaaaatggaaaagttaacttccaactattttgacaagaaatccttacggtctagaattcgggtatgttacaaaattctttccaagtcaaccggaatcgaccgaacaagttgacgtacagaatatgtcccagtgctgcatcaccgtatttgggcctttgggccgtgtcgtgttggaacccattagggttgcgtcaagggttggttgcacgaccctaaactctatatatcagtacccgccgtcacctttagggttcgcgttttgcttagattattctgtcaagaacagttttaccgctagatcggtttgtaagaccccaacttgtgagcttaatcattcatctacaattttagttgtattcttccttgttcttgtttgtgttcttcaattcacaaacagggattagccttctcggtgaggtcatccgtgtttcgacacgggtgataaccagaggagacatggtactgcgattgcggggctcaagagcgtgttcgttcaagaaaccggatcgatttgtgtcgcgactccgccaaatcgtcgattatgagaacctttcggaagatcgggaaccctagtccacatgataatcttcccacgagattaaataaatacgatacccttggaatactctcgggtgaaatgctacaatgatatatccgtgcgcttgcggatgaaatctataaccataatataccacaagtatttctgcgccattgctgggaattatatttctaggaatgtcgttaagaaatatcaacaagcattttctggcgctgttgccgaggaagatttataaaagagattactataagctaatactttatatttacatctgtatagtcactgtcctttggaggctaaccttggttgttttcacttttgttgtgaaaacagggtagtgtatgactagtttcaacttgtcagaaagtttcaaagaaaatctagaagttttcttccgaagcgtcaagctgcgagtcgttcctccgcaaaaaactctcctgagaaagaaaccagccatcccagcgtcatcgagcttcaagacaatggccgagaagacccttcgcgagttcgctgccccctcagctgagaatgtgcccgttgggcctcaaatcaacttaggagacacggacttcgatctaaagtctagccttatcaccatggcgcaggctagcctgttctgtggcaagccaaacaaagatgccagtgcacacttgcaacagttccaagagatccgcagcacatatacagtgaaaggtgttagcccagatgccgtcaggatcaggttgtttcccttctccctcttagggaaggtgaatgctggtatttcttaacgacattactagaaatataatcctcagcaatggcgcaaaaatactcgtggtatattatggttacagatttcatccgtaagcgcacggatataccattgtagcatttcacccgagagtattccaagggtatcgtatttatttaatcccgtgggaagattataatagagaaaactatactaataatttatatattacttgtaataatcaaagtctaagcaagggttaagataatgaatagggtagagtgacacacaacaagagaactatatactctcataataaatcatctaagctaagctaacccgtattgagctgtcaccatcagcggcccacctcgacatattcgcagcatataacccaaaataatgatatccagaaatctaaacaccacgcttaaatccgtcatataattgtgcctaaccgaacatacccacctccggtttcaccccctccttatgccaagtcgggcagtcccctctcgtgcctaggtaaatccggctacagcagagaccaaagctaggtccaaactgcaccatctcatctacccttaccacggtatgtcagctaggttaagttatactctagattcagcctggagcccatctgtcctgtggtgagtacgagtatatcttccagggattcccgaaaaccagtccttaattgtcatgggcatgagttccagaaatcatgcatgtacccacgacccaccattgaagcaaattttagtttaatcaaaccataaccatggtggtacatcaaaatataattaaggactaaattataatgaatgccattgtgagctagttgatctaagcatggctaaacattcctaaaccaatcatctagtcaaatataacccaagctatcaatggcataagataatccataggatgagaataataggcatccatcccacatgacattctaaaacaatgaaatttgatagaaagcaggggattttgtaaaataggctcaatatgaccaatgatgtatgtatgacttgccttgctcttgagctgactaaacctcggcaaccacttcgaaataaactggatcactagaactaacggaatctaaacgacaaataaagcacacaagaaatacaagcaataaggctactgaaatagtaaaagaaaccaattttaatggattctatacattttaatggattcactgcaatttgaatggattaaaacggagctcggattattcagttatgaattttacaagatgagctgcattattactaataaccgaagaaacctttgtcaattattatatattattgcccaaagataaaaagatcaatggaaataaacctccgataagcaagcgtcacgagttagtgactcaacgaatcaacttatcgtgccacgggaccatccaaacggtctaccgaaccggcgaacggaaccggtggctcagaacgacaacgggaaactaaacacggtttatgacagggactcgtacggcaaacgacaggccggtacgagtttagggctgcgcctaaggctttgcaaatcaagtaccgagcaacggcacagcggcaaaccacaacggtgatgcgggaggatataaattcctaccagagccaaaaatattcatacagattaaaccctatacattttggttgctcgtaattccattaaactttgtcaaatctttgtgacttctgtagatacttttcatgctctatgatcaatatattatgcacatgctaaacttctacactagaagctagcatttatccattccatctttatatccaccataccatcatcaaaataaattatccatgattaaaaatatgctttcttctcctaaaaagaaaatcctttctgaaaaacaaaagagaaggagggaaaggcatggttatgaaagtaataaacttatgctctctcaaaatattgagcatgttgatgaaaaaaaaggagaatagccatgccctctccttatttataaaagaagtattttggagaagagagtgagcacaaaggagaagcattttctttattttccacatttcatttccaccatatatcacacacacactttgcacgatcttgatcttgagtatgtctagtcatctattttagtccaagtttttgactcagtaataaatgtgaatacaagtatgccatgtttgatccgagctagtgtagtaggaatagaataggagtcttagtccgagaagtcttcgaaaggattcgggtatggctctactagctctgctctcttttgtaaaacttgtacttttattagattattcttctttataccactctggtattgtattactttccgagtatatgaataccaactttattatacatccaaactatattgattatcatgctagcttatctgggaaatgcaatggtgtgggtataatgatcgtttatatgattgctctatgtcatgacgatgatattagagtagtatttggtaatttaagcatggtgtttagattactggatatcgttatttggggttatatgctgcgaatatgtcgaggtgggccgctgatggtgacagctcaatacgggtattcctccgcacgtgtacatagtccttagttactttcctgtggagggtactcctccgtatttatccccggttggatggtcatgacgaattatcgtaagaaaatcgacaatcaggggtggcttctcaaagcaccagtagggcattgggaagagggtattaactaagtaatcatatagctaggatgtgtgtataatgtgtatgtatattagaagtgtaggaatagattctttctgttttctttccatttagctttgattattacaagtaatatataaattattagtatagtgaacaatgatcacgtatgaatgtttgaatttccaaaatttgcatttagatctgaattttgaggtattccttccaaatgaaatttccagagcaaaataaaataaaattttcaacgaaaatttgctgtgccacgaccacattgaccgttggattccaatcgccaaaagtggggccgattgggctcactaggggttcggccgaaccccgagttcggacgaactggccaggcaaccgtcagctacctcctttctttgaggcaacggctagtgggccctacaggtcagttatgaccgttgtgggcgcactatttaagccaaccggccgggagaggggagttcaccccatttcaactcattttcactccccttccaaactttgctctgaaagttcattcaagctttgcaagtttgcctaaaattcaacattttagttgcaaacacaagttgtcttggtgaagctaaccggcgggtagaaatcttgctaccttaacccccgctgagttagtccactttcttgctcatttgtgtagaatgaagagacgattgcccagcttgttcaacaagggaaatcgccatgacgagtccagtgctcattcatccgccgacgtctcaatggagatgctgatgttccaccacgcctcttgaacgacgccgacctcgaccttgtcgatgatcgggagatgcaagcctactatatgctgaaggaccggatgtttgctcacactcgggcatatgatccggagctgctgaaaaagatagatatggatgttgattctcgtaccatttggaaagttgttggatggcaaagatttgtggtagtagatgagcctggctctcatttgctttgcaatttctgtgcactttgaaagaaatagaagatggaatttcctttcgctttttccataaagaacataaacttacatagaaaggattaagtacacttctttgttttcatgatgcctgtaagattgatcttcggaaaggaatttctgggttcgagaaaaacagattttgggaagacatttctgatgctctaatttgcaagaaacctagaacaaatgacatccataatcctacacttaggcttatgcacaactggatagctatgactttgtttcctatatcttaggcccataagagagaatgaattgattatcatgtttgatatggctagaaagattaaagatgctcctgttaaatgtatgataagataatggttagagagtataagattcactgctcctgttgagtgcacttctctaattactcttatagcaaacggacttggcgttatttctaatgatcaaattgcttatatttcgactcctcatccctatgttgatgagaattatttagtgcaaggtcatattcttatgcatggagtagatgggtctttgatattctttttcccaggttgtacaaatgaaatcctgttgcctaatgcaggatatcatttgtacaactgttggtattccttaacttcatagatagaatccgcaagtgcatggaagataccgatgcagcatttacccgggagtattctcaggtatcgatttccacatggaacgggtgttacttccttatcaggttcgcccaaggatacaaagctaaagtgggacaaggatagagatgatttcctagtgtgaaacagtgtccagggaaagcttaattttaatcctaacgcaatacttcaggcactggcaacccgctgttcctagatgtcgctctactacgtacctggacagggaggacttaagtgcacttgagggctgtcaccacctctacacccctctcaaacgtactgtgggatacgcaacaaccactggatatctagacaccgcgtttacgcaattaataactactctagtgccaataaaacactaacgcaatcactataaattaatagactatagtgaacaatgatcccgtacgctgattaggaactaaccaagaagtaattctcactaagcaaatcttaattactcagaatgatatttctattaaagcagagtaattaacaagatacataagtaagaggagattatcgacaactccggaattcctccgatttcttctaccttactctctccgtaatctaatatacaataaagtacactagagcctcttgttattcagctcatgcttacaagtgaggttgagagggggtatttataggtggagaactgccttgggagtgtggagatgctccaagcatccaaagagcatcttctcttttttgttgccaagtgtccaaacttatgacggtttctaccggtgaaaacggccataaccgtcattgggaagcggattgctaccaaactgaacttggcctaggccaacagcctccgtgagggatcgaacccgagacggctccgttcgctccggttttcggcctggacactcattttgggcccctcaatccattggtattaaagtttggcccatttggaggtgtttaattgggtttctaggtccaaaactccttaagtttggatacgagtttgattcttctcctccttcatgtatattccctctcaactttggtagtttgtcacatgcatatgaatatacaccaacattcgtggaaattgttagaaataagccctaccactaggttagatgttttatatttatggtcttatgcaggtattgacggtgttaatttggtacttaactgccgtcaacaacaactgccatgagctaaccattcccctgtagaccatagaaaaatctcgtgcatgtgtatcatacagggacactcgcaacatggcaagaaacgagcgtgaaggttcaacatcctcgacacccgtgcagatgtacgaggctaaccggcagccaactggggatgcacccggatggtcacaagctccacgccacagcaccggaggttcgacctggcagagtgccagtgagagccgatggcaagcgcctcatgacatacactaggggaacttgaacactcattcccccagatcgagcggtatgcctccatcccccgattggtggcattcaagttcctcccgttgggacttgggtgaaatcacgaggaggatggataccctcgatatgcaaacgggagaaatccaacacagcctcaaggaacacatagtgcaaatgcaaggatggcaacagaacgctgatgctcagttcaccaacatcaacaacctgatgcaataacagcatgatgaccttcaagcgtacttccgcttccaggggttcaatccttatcaaggaccctgagagaaagtcaagcttggggggagagatgtctccccccactaaggtaacttgtatcattgcatatttctatttcaaaatgcacatttatctttcattgcatattataaactgaaaacaacataaaaatacttgaaaaaaaagaaaataccgaaaagataggttagattttattatgctaggtaagacaacttagttctctttgttgaaaatgatgaattattgctctgttttatatctctcatatatgggttcatggttaagtactctctcaaaaattgaataagagtagccaataattatccgggaacctgagggaagtgagctgcactttgctaatctgagtctaagttgttgtgagatttgagatagtaaataagagttgctatgatcctattctaaatttgacttgaattccggatgttttattttccaaaatgataaactcataaagatcttcatttcatataaattcctaccagagccaaaaatattcatattgattaaaccatatatactttggttgcgtgtaattccattgaactttgtcaaatctttgtgacttgtgtagatacttttcatgctctatgatcaagatcatacacccacaaatatgcacatgctaaacttctatactggaagctagcatccacccattccatttcgatatccattataccatcatcaaaataaattcaccatgcttaaatgtgctttcttctcttagaaaagaaaatcctttctgaaaaaagaaaaaaaaggagggaaaggcatgttatgaaaaaaaataataaacatatgctccctcaactattgagcatgatggaaaaaaagtgttgccatgccctctccatatttataagagaaggattttggaaaataaagtaagcacaaaggagaagcattttctttatattccacattccatttccatcatatcacatacattttgcacgatcttgatcttgagtatgtctagtcatctattttagtcaagtttttgatttagtaataaatgagaatgcaagtatgccatatttgatccctaccaagctccacatatcacccttagagtaggagtcaaaaaggcaaaattggtgaggaattcacattcatacactttgagagatcgagtgaatcaattgaggaacttagatttcttttgcaaaatcatttgaaaactttcggaataaaagttgaataaagatagggtgattagtgctctaattgctgttctgtctctcaactgctcaagacaagaaaaggcagtctctcgtgggaattaggtgtaagggtaagccaccgtgccaaatttacttaacttgagagagagtacacataccctgcatctgtacatttgagatatacagcatagtagcaactcctgatcaataaccaagtttagattttctgtgagtcctttactcgggacgagcaaaggttcaagcttggtgggttttgttgacggttgttatcgatcagtttcaccatcaatataaccaaaataagagagaactagttatgcttgcaatgcatatttatgttaaaataagttatattccactagcactaggattctaacctcttgcagagaataaacacaaaatggaggagaatcgacagcaaaatggatgatcaatcagtcagacgcttgggctgagaacactaaattgacatgacccaaacagcccgaaattcacaagtctgtggaaagaggaagtcaaggggtccaccagccgaaaatgggctggattgggccggaccctggttccaaccctcctcagcgccatccgatcgagggttttgcctggacaatgtggattagctcccaatgacggttggagggtatttccgactattccaaccgtcacaaccgtcattgggaggctataaaaggagctctcatcctccatttcaacacacacttcaagcaagaagaatcaagctctctctctagtttagtagtgttctaaagctagtggaataggaatagaataggagtctttgtccgagaagtcttcggaaggattcggctatgcctctagtagctctgctttcttttgtaagacttgtacttttattagaatatttttctttatactactttggtaatgtattactttccgagtatatgaataccaactttattatatatccaaagtatattgattatgatgctagcttatctgggaaatgcaatggtgtgggtataatgatcgtgtatacaactgctctatgtcatgacgatgatattagagtaatatttggtaatttaagcgtggtgtttagatttctggatatcgttatttagggttatatgctgcgaatatgtagaggtgggccgctaatggtgacaactcagtacaggtattcctccgcgcgtgtatataatcctaagttactttcctggggagggtactcctctgtatttacccccggttggatggtcatgacggattatcgtaagaaactcggcaatcaggggtggcttctcaaagcaccaggagggcattggaaagagggtattagctatcgtataattaggatgtatgtataatgtgtatgtatattagaagtgtaggaacagattctttctattttcttaccgcttagcttagatgatttattatgagagtatatagttctcttgccgtgtgtcactctaccctattcattatcttaacccttgccgtatgagacattgattattcattatcttaacccttgcctagacatgtgtctagtttcattaacatctatatgtatgtgggcaatgctagaaagtcttacattatgaaacggagggagtataaattattagtatacgatacccttggaatactctcaggtgaaatactataatggtatatccgtgcgattacggatgaaatctgtaaccataatataccacaagtatttcggtgccattgctgggaattatatttctagtaatgtcgttaacaaataccaacatatacgtggtgtctaggttgttaagtaccagtgattggtgcgtatcccataattcgttagaagttggtgtaaagatagtgatagccctcgagatcactgtggtcctccctgtctgggtatgggtaaggagtagagggtgttctggtagcgataggattgcgataggattaaattaagctttcaggagcctcactagaaaatcctctctaccctttgccaatctttcccttgtgtccttggatgaacttgaagaagagctgaacacacacgttccccgtggaaaatcgataccttggaatactcctgagtaaagtgctacatcagtaatttcgtgcacttgcggattttatttgtgaccgtaagaaataccaaaagccaccgcccttctcccaccacccgtcggtaggcccaggggggagtggaggaggccacacctctccacgccgtccttatctccaccggcaagaggagggaggagaggggagagagatgaagagaggggagatggggagagagaaggaagaattggaggggattgaggatgacatgtggggccgatgtgtgtcccacaattttttattattgtgtgtgtgaaactgacatgtgtgtcccatgggtgctttttatttttccggatcgaatttccgcgtaagcgccacatcaatgccacgtcaggtgaagagcgactcaaattagccacgtaggcaccatgtcagctaaaactgtcgtccaaaccgccatggaacctatattgcaccggtattgacagttgagggacccgttctatctggttttccggttgtaagacgaaaatcgaattcgttgacaagttaagggacctcagatgaacttattccttcaggatatggtagccgatacataacagtttttccttgggcttaaatccaaactgctcgcctattaacttttcagaacttcattgcctcatttctttccttcttttttctcttttatttatcttgctttttttcaactacaaattgatgaagacatcccagctacacttggcgtaaacaagggtgatggtgtacgtcatacatcacataaagaaaatgaagatgacgtaaaccaagttgatggattacgtctcagtaagaacgatcaagcatatcatggtacaattatgcgcagccatgctaaggaaaatacaacaagaggtgaactcgctattttctcaacttaacccaaattttagtgagaattttatactgcctaaatgctctacctttgtattgctaaggtgcacgcccgaggacatcatcactacgataagaaggatgggttaagttgaggactacaagggttacgccgaggaggaatcagcccatgcccaaccagcagctgtttacgcaaacaagaagatggtttgcgctgtaaaggctcaacttccaaggcttgtgtgacctagccagtcaagatacggggtgcatggcatacattgttggaaagagggacaactcgcatcaaaccccacctcaatatcattttccaataagaagttatgccatttttactgaagaccgcacatgaactgaagggttgtgcgcgaacccgagaaaactctttgcattctcatttatgttagccttgaccactataacgtggattcttatgttcacacctcaactaggagggatgttcctagtataaatacccctctactccatccatttgacaacttttgttcaactgaaaacctcatgtatgaaagattgctgaagactgcataagtgtcttacccctttgttcttgtgagttcttttagacatgtgagaaggctcctctggtgccccctagttcatgctctacagcttccagctcggctgcaccgtattgtgtggattagtctcggattgtggttctgtgattgctcggtttgacgggtcggagtccaagaggcttcggatcgttctcaccctcactacttggtcgaatccaactttggcaggtatgaagctagttattccagatcgtggttttgtgattgctcgatgtgatgggtcggagtccaggaggcttcggattgtagcaggtataaagctagttatcatcttgctgctcgcagctagttaccctcttgtgttcggtttatgccggcacccttttgccttgaacctactgccgtgaagattgggccacccctcgcgagtatgttcacatcacaaatatgataaaacaacatatccaaacaagaaatactcaatttggaagcaccaatgtctcaaactacatgaagacacaacagcaaaaatagggaagcgtctaaaaatcgggcgcccgacttttttttgtcaaaaatcgggcactgttgcaccaagtagatcgaaaatatttctctaaatagattgaaaatgtttcaagctgaaacacaaccaaattacctcatgaaacattttgctacaacgtatgaaacaaaggtttcaaaaaaattgggcgctgtttcaccctatataaaaacaatatttcagcaaatagtgagaaatgtttcaattcttaaaaaaagtgaaacgcggtcagatcactagataaacaatttgtttcaacgtatgcaacaaacgatttaaagccattgcaacacttaaaccccgtgtacatcaacaaaccacgtatccatcaagatgaaattattaaatagtatcaaaaatccactacaacatttgatacatacatacggaaacatcacaagtacactagctgaaacattgttggtggaacaaaaaagaacggatccattctaataatgcattaacgtgatatgtggccagtttgttgcaatgggcgcgcacgtggtgggatgaaagccgcggcgcacccgatggatgcgcacgtgcatcgggcgcccaatcgccggcattctcacaaaaataggtgccgaaacttgcaagggccaaagcaccttgaaaacatctaattttttatttactagaaaaatacacgtgcgttgcagcaggtaaatgctattttaatcctattattgttatacggtttagctaggatgaaatttactgtgggaatttgcttcattattttttttagaaaattatgagctacaattaggagctatagaccacaatgtttttttaggtaggatgaatgtttggcttctttagaggggacggcatcgaatgataagccatagaccacaacacatggagtcatttttgtcaagattagttttgtatgtaggacagctaacttcactgtcccacggctctatatattgaatgaagtccctctccgtagttaatttcgttccgtagcgtagcatagattaaaaaagcagtttttttgtcaagattagtttggtatgtacataggacagctaacttcgtcccacgactctatatattaaatgaattccctctccatagttaattttgttcctctccgtagttaatttcgttccgtggcgtagcatagaataaaaaagcagttttttgtcaagattagtttggtatgtacataggacagctaacttcgctgtcccatgactctaacttcgttgtcccatgactctatatattgaatgaattctctttccgtagttaattttgttcctctccgtagttaatttcgttccgtggcgtagcatagaataaaaaagcagttttttgtcaagattagtttggtatgtacgtaggacagctaacttcactgtcccacgactctatatattgaatgaattccctctccgtagttaattttgttctgtagcttagcatagactaaagcagaggctccagttgggttgtggatgttaaggatgttaagaataaatcttaggagttaaggatgttactgcaatcgacaatattgacacattagacaaagttactcctacaaataacatagtacaaaggagagttgagataatcatttaagttatagtttatatgttatttctcatgcaaggttgtcttttcgtgatatgatattagacatgctctcgctgctacaaaattatgctttccgtatgaatttttattaattgttgtctccatcgacggtcacgtgtagccttggaagtgtcctaatgggcctttctagcactcatgttggttcatgtagaatagttttcataccacataagttaaaaatctaatgcgtgcagcttgaattaaataatgacgatttcccaactccctatttttgttaatatgcttatatactccaacgatatctttattcatctactatatatttataatttcagaatataaagatggagctttgttaatctaggtgagggggagggggaatgggatgttacttcgttttttatatagtttgcctttaaatatagatctaatggctgaaataatgattttatcgaggtcagatgcttcgtgcttttagaatttctgtgatttttattaatttttaagatgtgatatgtagctgcttatgagagtagaatgatatatcaaatggttgaaaataatacgcctgccatttaagtgtgaaatgatggtaggatgttttgttttttctttctcatagaatttcaaggatatttcttaatttttaagttgtgacaggtgatggtttgcgtcctagatgatactcctatttagtgtacatatttatatatagaatgatttaagatggtataattattatcatttttttatattgtttaatgactgccacgctagggtctatgtccaaacgtatttcagttttttctttacctggcaaaatatatgcaataccgatcttgatgtatttatctttgctgttataaaaattaaagatgtttttatcaatactttgatacgtcatccgtgtatcagtcggtttttaattccgttcgcttttgaaaatacatgcatatccttgtttgagtcggtttttaagtttattcgatttttggaaatatagaaagtgctcctaattgtagctcataattttccaaaaaaaaaatatccaagcgatttcatacaataaatttcatcttaactaaaccgtataacaataataagattaaaatagtcttcactcgttttaacgcacgagtatttttttctagtctaattaaaaataaaaatagtacaaatgaatttaacgttgtatataaattgagaatcataattatttatctatttaaaatttaaactattttgtaatgagttgttagaaaataggagaaaaggggacggtatatggaatacgtcacatatgtacctactccacttacgtacggtggcatgtacggcaagggaagggaagggtacaaattctgtgagatatatctaatagggatgtttttcttttttcttaaaatttctaggattttttctaatttattagagtgccacgtggcgacttaaaagcgtttgtagagcgccacgtgacggcttgagagcgtttttatgaagtttaatgcacttttaatatataatagatagatagatttctaacgacttcttttgtattttcaaaaagcaaaaaaacttaaaatccgactcaaacaaacggattagtatttccaaaagtgaatgaacttaaaaaccaactaaaatacagatgatgtaccaaaatatatactagcaaaaacatcttaaatttttatttttgttcggctcgaagttagttttccgtcaagtacaagtacatccaaaacatagttcgtatgcaaaagatatataggcttgttttactgaaggtggcttgaatcgtaacccatgtttttaaatttttatttttgttcggctcgaagttagttttccgtcaagtacaagaacatcaaaacatagttcgtatgcaaaagatatataggcttgttttactgaaggtggcttgaatcgtaacccattcagctatggcaaactttccaaaataggtgaaatgtgacaaggagactagcgatgtagagcgcttgacacaagacggtttgcaacctacctaaaagacatattaacatgcgcctaacaatattgtttggcctctttagaggggacgacatcgaatgataagccatagacaacacatggagtcattcttgtcaagattagtaggacagctaacttactgtcccacgctctatatattgaatgaagtctctctctgtagttaatttcattccgtagcgtagcatagactaaagcagaggcagcagaggctccagccgggttgtgatcatggatcagtacatgttctccgccccacggccctatatatttatattgaatgaaatccgtctccgtagttaattttgtttcttagagcgtagtatagactaaagcagaggctccagctgggttgtgatcatggatcacatattctccaccaacgcatggctcaccatagccctcgtcttcatcattacactagctgcgaaggtggtaagatcatcagtaactctccctgcagagaagacgagcaagccgcggcctccgccggaggcgaaaggtgctcctctggttgggataattccagccgtgctgcgcaggggcctgcaggccgtgatccgcgagcagcacagggcgctgggcagcgtgtttacgctcaggtcacttgggcttgcggtgacgttcctcgtcgggccggagtgctccgaccacttcttccacgcgccagagttggagatagctatcgatggcttgtacgaggtcaccgtgcccatctttggcaaagaagttggctacgacatcgacttggacacaaggaacgagcagcatcgcttcttcgccaagatgctgaggcctgccaaactgaggggccatgttcttcccatggtctgtgagatcgaggcaagtacattttttttttgtccattacctgatcctataaattcaaagctcagatcatgtctgttatcatctccgtaaactaatcttgtttgtataggaatattttgggaaatggggagagtgtggcgtggttgatctgatgcaagaggtggatcacgtgctgatgctgatcgcgagccggtgcctgctcgggaaggaggtccgggagaacatgttcgacgaggttgcctcactgtttcacgagctcatgggaggtatgcacctgatcagcatgttcttcccttacctcccgacgccggggcaccgccggcgtgacaaggcacgcgcgaagctcggggagatattctcccagatcgtcaagacgcgcaagatgtctggacgtgttgaggacgacatgctgcaggacctgatagactcgacgtacggggacggccgtgccacgacggacacggaggtcaccgggctgctagtggcgctgctcttcgccggccaccacacgagctccacggtcgccgtctggacggcactgcgcctgctcacccaccccgagcacctgcgcgccgtcagggcggagcaggagcggctcgtggcggcggcggagcagcagcgcagccaccatggcggcggcggcggcggtggcatcgactacggggtgctgctgcagatggacgtcctgcaccgctgcatcaaggaggcgttgaggctccacccggtcacgccgatgatcctccggcgcgcgcgccggggcttcaccgtgcgcgacaaggaaggcggcgagtacagcgtccctgccgggcggttgctggcgagccccctggtggtcaacaccctcctcccgaacatctacaaggaccctcacgtgttcgacccggaccggttcgccgccgggagggcggaggacaaggccgttgccggcgcccgtgatcttgcctacttgtcgttcggcgccgggaagcatgcatgcatgggcgagggctacgcctaccagcagataaaagtgattttgagccacctggtgagcaatttcgagctcaaattagaatcacctttccccgaaactgaggacatgctttccatgaggcccaaaggtaaagcaattgtcagctataagagacggacgctttcctgaaatatgcaggaacgttgaagaatgtgggcaggttattgataggaacacataaatccatacgaaattaaatgcctaaatcaaaagttaaaatataaattatttgtctttaaagatatttcgagattgggaatgttagaattttaatttttatggctttaaaataaatgcgctgttgtcctgtatattgtacggtggatgtaatttaatttagtcattcctcttgcaattcgctcaaataatttacgcagtttgataaagtacaagtgtgatgtttatcgcgctatgtcaggcctgcagagaggaaatgtatggaattatcgaaatgagtcggaccaaaccaattgccctgtcatctttaatttttttcctcgccaaatgtttctctctatcggcgctgagagtcgctgtctcgctgacatccagttctccctctcaggtgaagagagatgttgatttgctgtcaagaaccctatcttccgctttagttcgattgtcatacacagaatgctgattttgacgagtatatttgtgacttcgaattaaaatttagaacttggggcgatgatgtatactctctacactactacaaaacatcaaatcggcactataggtgtcggaagtgctaaaaccaacaccaataggccttttcccacttctgcaggttgaaatcgcaaaagacggcacctttaaacaattataggtaccggttctaaataagaaccgacacctattctaaggtgtcggttttctaaaccgtatctttaatatattataggtgtcggcttttaaaaaaacgacacaaacataaatcgagccgagccggcaatcggatgagccgagccggcgggcctcaccacaagaggagataaggttcgatgtctcctcccgactctctcgtctcctctcatctctctcactctcttctctctgtctccctcccttctctctcgtggccggcggcagccgcggtcgcgccctccccttcgccaaatccggcgggaggggagccagtgggagtctggccgatggaggcggcagggcggtgacctgacggagcggcggcccggcgaaggcggcaggacagtgaccgtgctctcccctctgccagatctagccagaggggaggcggtggacctcggcggctgtcgggcggcggccagcggcatgggaaggccatcggcactcggggcagccagatccggcggtggtggtggaggaggccgagcacagtgggcaacgcgcaggcttccacctcctcccccaactcccctcgcttcgccatggtgtccaggtaccccctgattttgattttgttgttgtttatttaatgttgttgttggatgcctctatgttgttgttagatgaaatgtgttgatggatttgggggatttgacgcgttgttgatctttgattttgattttgttgtttgtttaatgttgttgttggatgaaatgtgttgatgtatttgggggatttgggtgattgggagctgctcgatgcaatcgagccgacggatcgagctagtttttttggctcgtggaaacatcataggtgccagttggaaaccccactaccggcacctatatttgttataggtgtcagtttacaaccagcaccgatgatggaactcatcaatgccaccttcgtggtgctagttgggaaaaccggcacctaagggggtttcccaatcggcaccatttagggggtctgtagtaatactactaattttgacattaggactgtcctgcaaaagtttgaagaggacaagaactatataaaagtcactactataaagatgtatatagagcttagaggtccgcactataggtatcggaagtgctaaaaccgatatctataaacctttttccacctccataggctcaaaacatataaaatcgacacctttaagaaactatagataccggtgctatttttttaaaaaaaacaacactcgtaaaaaccgagatgggagccagttgctaggatctccccattttttttgtgcaaagggaggcgagagggagcttatccactcgcccccccccccacctctagcacgtctctctctctctctctaccccttcagcctctcctcccctctctgtcggttgagacaacggtgacggtggggcggagctgcatccggcgtcggcggcaatcgactcccgttgaggatcaggtgttagcgggggctcccgtggcaggcacgggggaggggggcaacatcggcagcattcccatgacagatacaccgtcagcgggggctcccgcggctgatccagtgtcagcggcggatcgggcagcgtcggcggtagagccccgacctatttgacctcatcgaggactacttcgatggcaccctccacaccctcaacttcatcaccgcgctcgacaagtccctccaccgcgcccatgactccaagctcatcctccacctcgtgctccagcgccgctaccaccaccacgccgaagcgtcggagctgtacgctagcatgctcggtgagctgcactagttcaaggtggctggtgagcccttcacgaacgagttcttcgtcgcctttcagaccgtgtagcagcagtagatggccatggtttttgtttcgtgatgtttgttgaggacttttgttcatgatttgtgttcatgtatttttttttgtgttcatggtttttgttatgtgatttttgttcatgattgtgttcttggatagggatctcatgggtgattaggagatactggatgtatcggctcgatttgagtcgatgcatcgaaccggatttttttttaatttctagagccttaaaggtgttgcctcctgggtgccggttaggaaatccggcacacatgaaggtttcccaacatgcgccaatggcactttttgtagtattgagttatatagattttcaccaaccacaaagaaaatagagatttagcagtaggttgtcatctctatatttaaaccggtgttctactccccctgtcccatattagattatatcatttgaaaaaaaattaagtaagcatcaaaagaacaaagaacaaatgaaagcacaaaatgtgataattaatgacatggattagtacaaaagtgagtaggtaaggaataaaatagtataaaagtggataggtgggggataaggtatgatctcgggatcatgttatgaaaaatataaaaagtataatatcttatattatgggacagatggagtagtaatttattttattttatatcaatctatattttataatttgcagttgttttaaattgttaattttataataattagttttatcttatttaaaataaacgtcaaatgaatacctttattaaaaaaatgcccctcagctgctcagaacaatgaaaataggtagaacactgatccagaaaatcgttaggcgtggacgtagttgcccggaatgtccagatcagatcagaatgctgtttggaaggcattctgtcctagcacggccctgccgccgcacgtcaccactctgagaacactgcttgcatgacttcatacttttaaaatatatttggttaaaggacttcataggggctgggtcaaaaagaatattatgtatatatccgggttggctttgtccagtgaacaagtggcggactgatccatcccatctcatctctcgcgtatcgcgtgtgctgtacacgcgtggagtagggtaaccctatcgcgttttctcaccgtatcgtgtttttccaattcagatcgagagaaaagagggcggtggcggcgccatcatgcgcaggagctagtgacgccggtgtcgtgcggcagggcccgtggcgcctgtgccatcctcccttctctctcctcctttctcgcatccttccttttgctgccccctcgtcttcaaagccaccgccggcggcaggaaggaaaggcggcgtcagtggcggcaagaggcgaaaatcggctgtaggaacctattacagtgccctcctctctcttgtctgctactgctcctcgcatcctcttgtcatcctccatagctaaggtaaggaaactctagcactgtgcagaatctctgttattttattttcagtgccaaatttgtgcgattccgtttgcatgagatgaatatcccttactgtaaatagcatctgttcaagcacattgcatttttttccatcaattttttcatagtagacaatttactaatctgaacaagtattactatgtgatgtgggcaagtatatttgttgatgagatgatttacaataattaatgtatgctaattatcattattatatgtggcttcatcacttcctagttcctacgtatgaattgatataaggattaatgtatgctaattatcggtattttgctttggtttttgggatggctatgtgatatgaattgcattttatttccaaatatagtcatatgaatgtaatttatttttaaatagtgtggtctttatatccaaatactttttttgcaatgtgtatgttatatgaaaggtagcctcgccaactaatgtaagaaggttactctatctaggcaactcacctacatccctccaaccaaacaagggacagatccctcaaaccaaagaaaaaaaaattaggtcagttccactcatagaatcaaacataacctaggtccatcccataaaaaaacatgaatgaacgtgacacatcccaccttatacccgaaccaaacacaactaccaccttaccaacatcatgctggggaggctcgtcagggtcggaaacgctcagtaataagtgtcgggagctacaccatgatcaggatcaggtaacctagtcatggaaatatttctttctgatggagtcagacatcaaatgctcattgctaagagcatcccagcagttcatctaaatttcatcctccatactcctatttagatagtcatccaaaaagattcctactccattttacttttcactccaatagatcatccatattgcatcctccatataccaacatcctatattttactaatattttacaactaccacatatttatactcacctttcaccactctaaaaaaaaatccccccacctttatctcttctctaccgccgagacgacggggaggacgagggccgatcagagggacggcgcagtcggaggagtagctaggtggaggggtggcgtggtcggaggagcggcacgggtggcggcgcagtcggaggagcggtgcgggcggcgcaaggggcggaggggaggaggagtgcccaagtagcgggcgcaagtggccgacggcgggaggcagccggtgggtgtggaagcggaaggggaagcggcggcggtggccgtcgagcgcggaggaggcaggcggtggccagcagacacagatgcaagcggagacgttgtccttctagtatgcctctctctctctctccaccctcctcccggcgagtccatctccctcgtcctcccgtcaatggcccgccgccgccaccaccacccagtctctgcgaggagtcaattcggatggggcaaggccgacctgcgacgacggcggtggacgaggcattgatctggatgggggcgcgaatttggtctaggtgctagcagttgcgggatggcgtgaggagaggaacgccaaatttggcatttttctctcccggatagatgatgcgttaaatttggagggtgggatggagtatttgctgtagggcgtttttcttctcttaggctcctagccgctattttctcgatggatattcggatggcatatctgttggggatgctctaacaaagccaaaacaaaaagacatgtccatgttcccgtgtgaaagatgctcccctaaccagtaatacttcgtctcaaaataatttaatatactattgaatgtcacttcagtactagattaacttattctggaacgtagaaagtagcatagtttgaaatttcggtaatttcagcccccactggcaagcacaaatatccttaaattttttggttttttgtcaaatatttgtaaatttagtcaaaatttgttcaaattcagtcagaatatgttaaaaattaaaataatttcagacaacggacccagaaatcataaattttttaaattttcggtaaccaccgaaattttggtggcaaccaaaattgcaaaccttggaaagtagtagtagttgggacagttgaaaattgggtggaacattccatctcttagctgaaactgagtactcactctgtaatctactctataattcaccaactcattttactcatctctcaaccttacactcttacaccttaacggctcatattcatatcaaacggtcccgatcttctctgtgcaatcccaccccatcgcggtcccgcacccacgccccagcggagagccgcgccccctccatctcctcgctccctgcctccccactcctgcgacgcgccaacgcctcctctcccacgcccttctgcccaaaccctaatcttcctgccgcacgggagcaggttccctctgctgccaccagctggtgcctccctccaccacagccgcatcggcgccatgcctggacgccaccgtcctaccgcccggaagcaggttgagcgccggggtcggggtcaactactccgtcaactgctgctcacacctccactgacgacaatctcatatccaaggtacactggggaattagggttcttggcttcgttatgactgaattatgattcttggatttgtttgattgaattaggattcgtccaaggttatcttcttcaactgtaaatcttaatttctttctatttactgtatgacaaatgtacgatgactgaatgttgctcatttgcatgttacaaaatcaactctatgagttccctgcacactctattttttttctccgaaaaataggagttggaagatataagacttcagtgatattgcttgctgatccatcatgagttaacgactggggaaatagttatcgctttccttttggccacttttatggtatactatgcaaagccagttgtccttgtaattttcttgaaccttccactataatttcagattacattattaatccaagccacaacaaagtgtgagtgattttatatgttgaccatatgtactgtcttcttaactgttcattttgtctcaccaagactgaagaatgcatttatctttgtatatattccgaactatgaggttagatatacagatatgcttctactttataaatttgtggaatacaaataagctagggccaagataatgaaatatggcaggttaaatcatctgtggatatgcaatatgttatcaagccttagatttttcaagattatcagaaaatgtccttggaaaataagattactagaaaatggaagtgttatatacatgtctgcttgctttcttttgtcgaacagactgtattttaggattttattaaccaaataatttgtcctgattattacataaaataatttgttgctctcaagtacatgatttagtcatcaacgatggatgaactgattaaacgttcatgtttccgccatccattgcttttggtagatggagtatgaataatttattttacacctttgtcatgtacggccgcacgtacaggcgcaggcgtgacatgcgccgagcggccgagcgcgtgacggcgacgtccagtggctgaagaaaggaaagaagaaatctgctgctacttttggtgtccctagaattaaggatagccttctataattggttaggccagtggccatataatcctgtaatcagtctcgttggaagggcagccaatagattgtcattcctaatctctctctccactaatcgcaagccaccagccgaggggcaaaacctcgcggtgaggactggagcgcagctacgagctacgtagtcgcggtccggcgtcgttgggtgccgaggcacttgacaacctggtatcacgatcccggcgatcctctccttcccgcaccacctcccctacaccgcccgccgtgccaacatcccctacctcgtcttcatccgcttcctgcgctgccgccatgagcgacaccgacgacctcaagaccaccatcgcgcagctcgccgagaccgtcaaggccctccaggcgaccgcggcggccaacaccaaggcaatcctcgcactctccgccgacaagtcgtcgtcctcaggtcccagggcgggcatgggggagaccaacaccgaccggccacctccgcgcttccagaaacttgattttcccaagtataatggcaagtccgatccgctcgtattcattaatcgctgtgagtcatacttccaccagcagaaaatcatggcggaggagcaagtttggatggcggggtacaacttggaagatggtgcccagatgtggtggattcaagtccaacgggacgagggcattccgcgctggcgccgcttcgtcgacctcctcaacctccggtatgggcccccgctccgatccgcgccgctctttgagctcaccgactgccgacgcacggggacggtcacggagtatcaagactgcttctaggcgctgctccctcgcgccggacccttggaggaagcacagcgggtccagctcttcacgggcggtctgctgcccccgctcagccacgccatccgcgtgcacaaccctcagtcgctggccgccgcgatgagcttggcgcggcaactggagttgatcgagcagtccacgccggcgccgccacccgcccggcctgctccgcgcgctcttcttccggcgcctccgcgccgcctcgccctgccggcccctgaacgagccgccgcgtcggccgcaccggtggccgggaacccggtgaaacgtctttcccaggcggaacaggcggaacggcgtcgccttggcctctgctacaactgcgacgagcggtatacgcgcggccacaaccgcgtctgccgccgcgtcttcttcatcgatggggtggaactcgacgacgccgacgacgcagaggctgccgcggaccaggacgccgaggcgcctgtcttctccctataggccctggccggggtacccgccgccgacaccatgcagatcgcggtcgcgcttgggccggcgtcgctcgtcgccctcctggactccggcagcacgcacaacttcatctcggaggtggcggcgcggcgctccggcatgcccctgcacatacgcccccggctaacggccatggtcgccaacggcgagcgcgtcacctgcgcgggcgtcctcaaggccgcgccgctcaccatcgacggcgtcctgttcccggccgacctcttcgtgatgccgctggcgggcttcgacgtcgtgctgggcacccattggctgggcgccctggggcccatcgtctgggacttggccagccgccggatgtcgttccagcaccaagggcggaccgtctgctggtccggcatgcccacccccggcgccccggccctcaccgccaccaccgacagcgagctcctcctggatgggctcttggcgacatctggggacctcttcgccgagcccacgcgtctgcctccccagcgcgcgcacgatcaccgcatcatcctcaagccggacgcgcagccggtggctgtctgcccgtatagatatccggcggcccacaaggacgagctagagcggcaatgtgccgccatgatcgagcaaggcatcgtccgccgcagcgactccccgttctcgtcgccggtcctcctcgtcaagaagcccgacgggtcttggcgcttctgcgtcgactaccgcgccctgaacgcgctcaccgtcaaggatgctttcccatccccgtggtcgacgagctcctcgacgagctccacggggcgcggttcttctccaagctcgaccttcggtctgggtaccaccaggtgcgtatgcgcccagaggatgtccacaagaccgcgttccgcacccacgatggcctatatgagttcttggtgatggcgttcggactctgcaacgccccggccacgttccaggccctcatgaacgacgtcctccgccccttcctgcgccagttcgtccttgtcttttttgacgacattttgatctacagcaagacatgggcgaaccatctccgtcaccttcgtgccgtcctcaccgagctccgctgacaccacctcttcgtcaagcacactaagtgctccttcggcgcctcctcggtcgcctacctcggccacgtgatatcggcggcgggcgtcgccatggacccgtccaaagtgcaggccatccgtgactggccggctccccgttcgcctcgggcagtgcgcggcttcctcggcttggcaggctactaccgcaggttcgtccacaactacggcacggtcgccgcgctgctcactgccctcctcaagaaagacggcttctcttgggatgatgcggcggcggcggcgtttgcggccctcaagaccgcggtcactacagccctagtactcgcaatgccggacttcgccaagctcttcatcgtcgagtgcgacgcgtcgtcccatggtttcggcgcggtgctcactcaggagggccatccggtcgccttcttcaaccgacccgtcgcccctcgtcaccgcgccctcgccgcgtacgagcgcgagctcatcggcctcgtccaggctgtgcggcactggcggccgtacttatggggacgccgtttcgccgtcaagacggaccactacagcctcaagtacctcctcgaccagcgcctagcgacgattccgcaacaccactgggtcgggaagctcttgggcttcgatttctcggtggagtacagatcaggtgccatgaacaccgtcgccgacgccctctcccgccgcgacgtcgaggagggcgagctcctggccatctccgcgccccgtttcaatttcatcgagcggctgctccacgcccaggccacggatctgagcctggtcgccatccacgacgaggtccgtgcaggcacgcgcgcggcgccgtgggccgtgatcacggacatggtcacctacgacgggcggcttcacatcccgccggcctcgccgctactacaggagatcgtggccgcggtccatgacgacggccacgagggcgtccaccgcacactccaccgcctccgccgcgacttccattttccccacatgcatcgtttggtgcaggactttgtgaaggcgtgtgcgacctgccagcgctacaagtcggaacatctccacccggccggcctgctacagccccttccagttccgtccattgtgtgggcagacatcggcctcgactttgtggaggcgcttcctcgggtgcacggcaagatgatcatcctctccgtcgtggaccgcttcagcaagtattgccacttcatccccttggcgcacccgtacaccgccgagtccgtggcgcaggccttcttcaccgacatcgtgcgcctccatggaataccccagtcgatcgtgtccgatcgcgacccagtgttcacctcggggttctggcgcgagctcatgcgcctcatgggcaccaagctactcatgtcgtcagcattccacccctagacggatggccaaacggaggcggctaatcgtgtcatcgtcatgtacctacgctgcttcaccggcgatcgcccccgacagtggctgcgctggctaccgtgggcggagtacatatacaacaccgcataccaatcttcgctccacgagacgccgttccgagtggtctacggccgcgacccaccctccatccgctcttacgagcctggcgagacccgcgtcgccgctgtcgccctggagatggaagctcgcgaggccttccttgccgatgtccgctactgactcgagcaagcgcaagcagtgcaaaagaagcactacgaccggcttcaccggccggtgtcctatcaggtggacgactgggcgctccttcgtctccgccagcgagcagcctcgtccctgccgcgcaccactacggggaaactgaagcctcgatacgtcgggccctaccgcgtcaccgaagtcatcaacgatgtggccgtgcggctgcagcttccgccgggcgcctgtcttcatgatgtcttccatgtaggaatgctcaagaagtttgtgggcacgccgcccacttccaccccggcgctgcctcctactctccatggggtggtggttccagaacctgcacgcgtcacacgtggccgtctggctcgcggcgttcggcaggtgctcgtccagtggcgcgacgagcctgatgagtcggccacttgggaagacctcgacgacttccgcgcccggtacccagcgtttcagctcgaggacgagctggacttcgacggagggggagatgtcatgtacggccgcacgtacaggcgcaggcgtgacatgcgccgagcggccgagcgcgcgacggcgacgtccagtggctgaagaaaggaaagaagaaatctgctgctacttttggtgtccctagaattaaggatagccttctataattggttaggccagtggccatataatcctgtaatcagtctcgttggaagggcagccaatagattgtcattcctaatctctctctccactaatcgcaagccaccagccgaggggcaaaaccttgcggtgaggactggagcgcagctacgagctacgtagtcgcggtccagcgtcgttgggtgccgaggcacttgacaccttcgtgatggtttagtaaagcttgttttggtgaaccattaagctggacacactaatggttcccatggactgaagttcctgattccatttaagagggagtctcccgttgtgtcgttcgctgacagcacgcgatccaccttcctcacacccaagctcccccaacctccaactcaaaggtattattaggatttctcctttctatatgtggaatcagggggggctatggttgtgtgtttgatgtttactcgattttgtaatgcaggtttggaatctgtaagaggtcggcgccgcacctggatgccaccttcatgccaatcgggagcagtaggagcggcggggttggggttgatgccgaggtggtcgcgtggtacctcggctcgggtcaatgccgaggtggtcacgtggtacctcggctcgactgaggcgcagcccgtgctgatcaacaatgtaaccgccgccaccatcttcaccgtcgccaacctctcctcttaggtggggtgccagtaccttctcgcttggtcgcctataaatcctaaatatttttccctctccgttctcacctggaactgctgtttggtatgtgatactacttgtgaagctggattttagggacaggaaatgcctattccagtgttccttttctcctgattagatgtcatgttgttggttttggaataagatatttgcattaaatgaaactttgatagtgtatcatggccttgttcattaaatatttgtattgtagaatcaatttttgtgtgttacatgtaaacatgataccattacataatgtggtggccgccactaccctttagctaagacatatttatatatttggatcattcatgcagggggggcgagtgccaccatcgccccagatggggagccaccatgtccactgtctatcatgtgtgctgtggcaggcaggcagctggccagacatttgtgcgcgctgacctaaccggctccagcagttatttcgcacttggcagccaacctaacctcatgggatggccttttccaggttcgaacaaatcttctgctaatctaacataatagtgcaatcctggtgtatgtgtcatgttgacattacttagaaggtgaacattttgcatcctcagttcgtcacaattggcattgttttgtccgacaagaaaaactgaaaaaccaaacctataggtctactttgtccttgagagcaagaatattttttgagaaatctgatttagtaaatggggataagaactagaaggaaatgtttttttttgttgagtgcaatatcttaaatgctgagtaagacctatccaatcatatataagaaccatagtgttggaagctaaatgtgtgctaaaggctaggcttgtatacctgggttcagttaactgttaactattattgcctgaattctgaggttgcatcttaggaaagaggacatgcaacacaagaagaaatatatgcttttggacaaaatatgttgtttaatcaacatttggaaagaatgtcagggtggctatttaacctttgaacccaacctatgattaaaccatgctatgattaaaacccaaaaccatctatatggtaatttccatggcggcactatggcttgtatccacccttgttctgagcaatatgggatatgcccattaatacaactagatgaaaccccgcgcgttgcggcgggcacattagaaaagatgaaatatgcatgtaagtatgaacaatcagattgtattgtttgaacctaaaaacaaattgataggcaaaatatgcactcaagtaagaaatacttgaaacaacatcgagtttaatagtatagccaactactagctccaaatcatctatagtcaatttaatagccaattcatataatagttacctataaacatacactacaccattaatatctggtcccacctgtcatacacacgtaatatcttggagtccgtgctgcagctaggtacaaatctatagcccactgctcttctctcttcttttttatctccttaaaatatatttatagttggcttatagtctactatttacctgctctaaattgattcactggttcattttgctggttttattacattcttggcaaactgacatttgtatcttaaaaggatgttgttttgcatggataaagatcatcagcagatgtatcatcaaagggaatctagcctaacctggcacctcaacctgaaaggcttgtatcaagatcttatccttttcttcttcttcgttggcatattatcattttgttatgtaattaagtacttagggaatgatttcacatattccttccaaagtttgggttgcccattgtcttctgtcattgcagaatagcaggatcacaataaaatacagatgtcatgctagctcattttgattgttctatttataacaataacaggaagtcagggaacatcatgacctcttagagataatatattatcaaaatggcctgtataaattgggatgtacacaaatggctgattttattcttaattacttctctagaaatacaaaagggatgtacacaaatggctgattttattcttaattacttctctagaaatacaaaagttggaaatctttgtggcttctcgaatggcttttcttcaattatctatgtacaaatacaaatgatataaattttgtggcttcttggtcctgtatgctattttgactcttaattgttgaccaaatatatggaaaggatactgatctactgtattttgatctctgctcatgactttacatgaagcttgaaaacccatgcatgatccctagcagaggtcttatttttgtgaagcttaaatctatcctactccattaacaaaacatatttcacattttggttgcttgatttacataaaaaaaataaccgtagctccctagcagaggtcttatttttgtgaagcttaaatctatcctactccattaacaaaacatatttcacattttggttgcttgatttacataaaaaaaataaccgtagcgttactacaactacaacaacaactactaacccaatgctcgctataaatctgtacatgcacttgtgaatctagaattggatttttttttttgtttggagggtatacagctgcactacaattaatattatttttaagtcatctgcaaactttttataagtcatctgcaaactttttttcaaaattaaagacctcatgtttaatattaaatgatcacatgtctttggattatctataacaagataatactagtttacaagttattcgacctcatggaactggtctgctaatcaaacaaggctctattattgtttccatgacctgtgaagcaaaacataatagtgaaaacagcgtccaaacgttatccactgaattcagtgagttatagatatcaacaactgccgttatcttcatctctataattaaaaaaaaaacaatgtggcttctgtcaatgttatgaatcaggtaactgttagtgatatgccctagaggcaatcatatagatgattgtatcacatactatatttacatatttatccgatattgttccttgaaatagataactccttattggttaatgaatatgtgattctttcatgagactctttatgttgtttgttactatttctaaaggatccctgatcaaatatcatatgtggaacaaatatgtttatatgattagtacatgtattaattgatgatcatgtctcatggatcatggtatagagataccaaattaataatgtggacacatattggtgaacatgttgttggatagacccaacatgagacactgcaagagccatatgtgttgtgtcatcagtgatctcattgagtgttggtgttgaatccttagacctgagattattatggttcttaacatgtgtagtagcttacttagggactgttaaacgctactccgtaattgggtagttataaaagtagtttttaggtatgctatgaaacatgtagtgggatacgaataatcaagatgggatttgcccctcctatggagagatatctctgggcccctcgatgttgtagattatgaaagtgcatggccatgccaaaggtgattgaggagtcaatcacaagttatataatctatcaacagattcgagtgaatgattgagctattagatgatggcacatatctagccttgagcttaatcgatatcgtgaggcaaaggggttcatacaagtatacactagaggttcagctgatatgatctttatgtatgcccggtgggtcaatacgttctgctaggggccgcggttgacgtgtggaccgaaaaggagttttcgggttacagccgagtatatatgaacctacagggtcgcacgcttaatgggccggaataaggggattggatagagatccaatatgagcttaattcggatagggatccgaataggagtcctatgggccttggaggcccgagtgatggatcctatatattcgtgaggggtgtgatcggcggaggcattgcatcacgtgagaaaccctagccgtcacttccctccccgagcaaaaccctagccgcgcgcgggtgctagcacatctgcgcgtggcgttccgtccctatacgtgtggataccgatagaggcgccgctggtttgcggtgctgatcggcgtgggagtacggcgaggagaacgcacgaggaggagaaggtcgagccggtgcgatcgactacttcctctacatcgacgcacgctacttcgcgagaattccttcgacttctcagtgtcttcttccgctgcgcagcacgtcgagtggtaacgatctatgatcaaatacttgcatggttcatggtttacgtgatagaaaattttgatttatgctatcgtagcctacgcgtatcctaacagtaaccaccgaaaatactggatacttagtattgtatatttatatttatacacacacacaaaggtatacctagatatatgaatattgcaaataaagacggaaactcctttcccagtaaggaaggatgtgttatctccccatacccacatgaactagttttacttgaacaagcggtcacatgcccatataaatataacgcccctaggagaggatgccttcaaattataagccatacccacaagcaacatcgaagaaacataaggaggaagtctacacctagccgctgactctaagtcactggtctcgatacagactagttagcacgctagattagctagcttgcttccccttttgtaatcagcgcgatacatcccatagctatatatataagctggattaggattgttacccacctcggggcctaaaccagtataaaaatccatgtctctaatctccttactacaacttcgcgtataccctagtactccctccatctacttttgatagtaatatttccaaatctgaaaaatttatttttgatagtcatatttcaatccaacaacttatcatcttaatgactttctcggatttaatgcgtgactctccattcttccacacatgattggctacatgggcattgaaaaatgtaaatattaatgaattgcttgtttacgagaaatgactagtagcatgtttaaatggatgataaatagaattacttatccttggtctgtgtgccaatataaaatatgactatcaaaagtagatagaatgagtatcaacgtaccccatactcctaaaatacagttgtcgggtctaacccgtcgatagtggcgcatcacatagaggtcttggtgcttcaagatttcgagtattgcttcaagaggcagattgtccgatgaaggtttcaatgaccgctctctggttgggagatacaacccagccggcattcactttctccaagtcgggtctatcactttcctagtcttcgctatttcaatcttcccttcggctcccgccaagaactaaacatccgtcaaaacccgctcgtaagaccaggaagcaacggtgccacatcaataaaactggagctcactctcttgctggatgcactgttttccaaaaggagaaggctgaatatgatattgccaatcatcaatatactcagtatgtgtccccatacaaactgtgccctcgtcgacaagacgagttatcaaactctggtggagtgaaaggttttcctcaagaaagccgaatcgataacttcacctccaccagccaactcaacccccccccccccccccaagcgttgtctgatagacctatgtgcatgttcgacgagattttgtgcattcttttagtgataaaaaaacgtgtgtgcagaaacccaattctagcactgatcttaaagcaaaggaacaaatgcacgtcgatctattatgtatttccaggaactcacgcacgcatatattctttgactgttaaacatggcaattagtggttaattccagttgattacgacagcatactgccatatttcatattggtgtatttatttttccatgcatgttgcaagtgaaataaaaaatgaaagagattattgggctagccttttttccgatcggaaagatcataaaaaatatatatattctcgtgaatgggaagcaattaatcaaaacttgcctatctaactcccatgcaggaagctgatttgaaatgaaataggaatgcctcatacgaatggaaatatttcttatgtatggtgggaatttattcctccgtgtcacagcaaaaatggaatgtgataatctttgtcaaaggaaatgtgagtgcatggatggaacaagagcctgatcaaatcatgtaattaattgggttgatcaggctaatgatatgctagccattcacaggcagcaccgccttgtctctgctataaaaggccaagcaaactcatcatttgggggcagcagagagaggatagaggcacgagccgagggtctgcagtccacgccgccgccgccaggcgctgcgccatgcccaaccttggcagtagtccgtagagagacatacacagagacacacaagagaaatacagaggcacaaggagagagaggagacacaaccaactcattagcaatcatcagtgtctactgatcatcggcaaccatcatgcacgccatcttggcaggagcatcccggtgtccggcggggaacacgtgtactcggcggcccggcgaccttggctgcaacacctccgcgtccggcaagagcgcgcgccctgaggaggagacgatcgttggagaggagcaagacgtcgccgctccggttcactgctatgggtaactaggttgttttttttctatgcgttcttctgttctacttcagtgcatgcacgtcgggatggtgttcatcagcagggaagacgccgggtgcactgccatcgccggagttgccgggtcaaccgattcgttgacatcatccgtgagtctccgtcaagaccgacgccatctgtttgacggtcgagccaccggcggcgcttctaccgggcactgcgaggtcaccgagatgcttggacgtcgtcaccttgccggtcgcggcctcttctccgtgacgccgccaacatccattcgctctcgttggcgcaattatcttcttcacactcatcgtcaagcggcccgaggagaacaccggagcgccatggcttggtgaccgcacaccctcgtcaagttcggctatgattccttctcttcatcaggccgaggatgccgcgccgtccgtccacgacactttcactcgtcacgctggagtcaccctcacgccaacgattacagtgtcacgctcgccggcctcgaccgctcgatggcaaaacccttacaagtacaacgccgtcgactgcccgactgccatcgacgacgacttctgattcgtcgctatcaatgaagctagtcatcctctcatatttgttcacactgctggttgctgccaacacatcttcgtgtccaacgaggagtgtggacgactgcaggatcgtccctttcgcctctactggtgatgactccaagcccctcttcgctgctagcatcatcttcacaccaactacggtgttttctccctcgatcgctggtgccgtcctatgctcaagctatggctggcattgccaagattgcatctggtgacaatcacaagtttgtcgctgttgccgatgataactgcaactcgtcagtgccatctttgcaactctgaaggtttcctcactggtactaactatcgatgtagccgccagtgacgacttcaagctcgtcgctgcagttggcatccttatcacaactattgtggtgtcatttgcatgcccgtgctactgtcggcgcccttggactgccaccggagatggtctacgactcatctttgtcaccagcatcgtcctcatctcatccatacacccatcacgatttcccgtggctgttgtcaccgacgtgcttgaacttggccccgttgccggcctcacccatatgccgccgaccatcatttttaggaggttgttgtcgacaacgtgcttgagcttggcgaaccgctggcctcaacatgcttccgccagtgatgtgcctgagctcaaagccgctaccggcatcctgtggctgcctctgctgacatgctcgagctcgaactaaggagagacgtccaacgacgctttcccatgacgtgtgatggcatgattccataaccaattcatacccgctatgattagaggcactcccaacataattgggttttgcccctatcacacagcacacataaagcagggtcatcgacacctggagtgttatccatcgctcccaggtttcgctacgcccctaacatcccctacagccacttgatactaagagcgtgctgcagcgatcagaaggctaacttctgtaccatgatgatgatcgaccagtgccgtggagactagatgggtgatgctaccccaaccgccagtgaccataagcttggaatctccaccggtgtctctattgctcctagcgatatcagtacacatagtgatgactttttcgtgaccaccgtcggcgtatatactctcaagctcgacgccaccaccgatgtcattcgtgctttcgctaatgacccttcatggctaccacgaacatactcgagcttggcactactaccgacaccgtcatcttattctcaccctaaccaatgccatgctagtccccactacaagtaccatctttacctccaccgacgaggctgaatggcagggcgggcggagtctatatggagacggcgtcaccaacaccggcgcacggactgacgaggccgtggaccattgccgacgcccacacacatctataccaccatcaccgtcatgcatgggagaacgtgaagcgaagatcgacgacgacgactagcgcagcttaatcggaggtttctcacgagtttaactcacgagagtaattaaccgggtgtcttccgagaccttgggaattaggagaacacaatcgccaattcagatccaccttgcctataggccatggagcgcatttgaccaaggattttgtatttttgtaattcttttgagaattataataaatgcatttttcttcgtctattttattttgtgtacttagtacactggcatggccgcgcattttattttattttacttccctgggcggagagattgaaagttgaattttctctccaaacagtgcatcgatacaaggttggacgacgagatgtcgaatgacccgattctcgatgactcggatagattggtcagtaacctcggactatatccactcgaaccatccattctccacaacctggattctctcaagtcctcgggatcggacttagaccgtgatgtcaacgtaattgagaaaacggagctacctacccgtacaaacaaaagggcaactcttgaggaagatgggccattactcatttccccgagggggaattcacccattagaggacgaggatggttgcaattggttctccatggggaatcaaactggcaaaagcaagtacccattgggtttggcgagggcagctccatcccccatccccattccccgtggaggccaaatccaataaaaatgtgtgtctaaaggttctatcgttccatctttagtggatatatcacaatattatgcctttgtcatgtggattagtatatatattctaatatgttgatgtaaaatatggaagttccatatatgattagaggtgtgaatgattttcccgttacaattcgagagggtgggtacgtgggtgtatttccatgcggggaattttccgttgccatctctaacgaaggagcggtgcatagtgcacgtggcggtgacagtgtggaaaaaccatgtgtataatgatccgtggtagcacgatgagagactagctggactgccacatagtcaaccacaagatctgtgtggttcacctcaagaatcccaagccgtcgacgctgccattgctacaaggtgagcttgacggcagttgcttgcatgaacagaagttgggaaagccatacaggatcttctgaagtgatcaatcttctccaatcagtcaatgaatcagagaactagcatgatttttatattgacattgttctttttttgggttaatctcaaaccctcaacggtgaggcggcgtggtcagggtctctgtcacacgggtgagcattatctcatgggagggaggggggtggaaacagatttctgttggaaatttattaggggctcaccttttactttttgggaagccaattttacctaatctcttggagtgaagaaaattttaacactttaaattctgtttagggttcccataatcaaaattttggggatataattttaagatgctcttggtgatgctccaacattgacaaatgtacacatataaatatattctctattgcaggtttctagcccaccacttgacagccgctgcgagaataatcaagaataatatgcgaagggaaatgtcacaacctagctataaggtacatcgacaatacaaaggcgtatggaaacatacgttggggatatcttgtaggtacagctgtacatctctatttgagtaaatctgtttaaattgctatgcccacggttgggatgaccaaccaatttcaccataattagtcccacactttaattaagttgacataatgaagttgtgtagtttagatcgttggtttgcctcgttcatgatgtagttttgttcaatggagattaatattctcttaatcaactaaccattttactatttaaactgcaaaggtttacaaccgcctttatgcaacagagccacacacctccatttgaatccctcacacaattacattattggtgtggcctgttgagtacggtggtttgtagtcaacatttctatagtttccctcttttagaaattaagtgcattaatgttagtacggagtcaaaggaccaaggcttatacctcacttgagcatgcatgtggagtggagctagagccctctaggatcgaccttttcgcttctactttctttttaatgtgaggactaagtgtcttatataaatatttacgatttatttatgtttgggtctacatattaatttgttattttgtgttacctggtttgattcatagatggggatttaatacccaaaatagtctaaaaatggctaaatttctggccattacagagctcctcactctcctgcttcctttgtctatcagctttgacaaggcctcctattcctcatgcgggcccgagggtcttaacaggggtgcggcagttgcatacttggagggaaatctcttatgtagcaagttggggcaaaaatgccatctatgtgtattgtgaataacctaatggatctagaataatctcaaccaaactaaaaacaacctttactcggccggcctaggcctagtgcatgcctatcggggccgcgaggtgaaggagagtcgaaagatggggagcacccgatctgtggtatggagcgacgacagtgagattgcaatggccccattcccttgccccgcggataattcgctcattaggagacatggatggttcaattggttctccacgggaaatcaaataggaaaagcaagtacccatcgggtttgacaagggcggggatgaccctccatcccctgtccccattgcccgcggaggccaaattcaatgaaaactagtctatgaagtcgcacattcgtgcgactctaaccatcctattgtatgttacgtttataaaaaaaaatataagaataatattagtgaaatgaggaatgtaccatcaatataattgtagtttgtgcaactgtaactgccctatacaaacaaaatgacacacgctcagcagccaaagctaaataaatatagctctttttccttgcacattgtttgttaagtgttactaccttcgttttttaatatataaacgccgttgattttctacaaacgtttgaccattcgtcttgtttaattttttttttgcaaatataaaaatatttaagacatgcttaaaaaatatttgacgataaatcaagtcataataaaataaatcataattaaaaaattttgaaaaagatgaatggttaaaaatatcttaaaaaattaacggcgtcatatattaaaaaggagagagtacaacatatagagtttacaatttcaaattttaatttataatagaatttttaggtataattatgcacacgcatatgaacttaattagaaatattacaacactattattttatggaccatttttcaggttatacggaagttagggggttttcggcatttttaaaaattgttgtatttgctttgttaggagttagtcaaaattatatacagtggtatccaattgttgttttcttttttgattgatgagtagtatgaaagctcgttcttctacagcaacatattttcgtatggagtatttgaggagacgacttgcagctggtagtgctggtagagttgcagtacctacgactgtcatcttctttttttttcctactccctccatcccaaaatataacaacttcttcacaaacattctcttcttaaccaatcacaacccttcaccactcaattttttcacctaccttcacttctcaaccaatcacaacatcctattatttagtattacctattttcttaataaccgtgtccaagtctataacttattatattttgggacagaggtattagcttatttccctcccagacctgcggtgtagatgcttccggggacttctctccattccctccattgaccagaggagtgtaatttgttatattttgggacagaggtattagctttttttcctttcagacctgcggtgtagatgcttcggggacttctctccattccctccattgaccggaggagtgtaattttttcaccttcttttaatctgatggctcttgtttctccacctagttttgtcttctcactaattcaacggttcatgttttcttgattacgtggttaatccctgttaagttttgagattcacatttcactaatacagatatgcatgtctaaaggttcaatcgtgtcatatttagtggacgaatagtaatattatgtctttgtcatgtggattagttgatagaacaaaaccatatgtaaaactacctaagaagtcaatttccatctatttttgaagatcgggagatatgttatactttgcggttgagggaggtgattagcaatagctgaggaaggcaaatacccactacaaatgacaactcggactgagctgcggcccatttaaatttcagaggaccaagacaaacggacacaactacacgaagagtgttagctgaatagtgctaaagagacacacccttcttttcaaaaaaaaaagctactagtatactcaatatctatgttttttttgttagagaagtttctcttaaattacttatccgatttataatctaattataccgttgtgttcgttgcaattaaatctttacaataagattacatgattaatatatatatatatatattgtaaattacttttatcatatagaagtaaattcgcaagtaaagtgtagagaagatttataaagtccacaaaatatagaattaactaaaaacaataataaaaataatcaatttagagcattatgaatgcatataaataatttagtcaaatctaaaagtaacttaacttatatatatatatatatgataaaagtaacatacgtatataataaaagtaatttataaatataaatatttgttcatcgtaatataatcatgtaagattttgttgcaaagatttaattgcaatgaacgtaatggtgtaatcagattgtaaattggataactagtttaagagaaaattctataagaagaaaacaagatatgcactattggatatactaatagcaacaaaactcctaaagtactagcacatgggtatctctggttaagactaattggagacggaactgctaatgcgcggtgatcgctcccagcggagcgatcacccgcactcccctccccctatactcctccctcttctcccccttcctcctcctgttattctctttctactacagtacatcacaaattttttttaaaaaaaaacaaaagttagaaaaatttatgtatagaaatacaatatataaaaaatttgaattcaaattcaaatttgaatcgggtatgtaaacttttgacttataaactttgggtctataaaatttaggtgtataaactttatatgtgtagaaatactatatatagaaaatatttgaattcaaatttaaatttgaattagatataattcatattcaaatttgaatcgggtatataaacttttgacttataaactttaggtctctaaacttggtgtataaactttagatgtatagaaataatatatatagaaaatatttgaattcaaattcaaatttgaatcatatataattcaaattcaaatttgaaacaggtatataaacttttgacttataaactttaggtctataaactttaggtgtataaactttagatgtatagaaatactaaatataaaaaatatttgaattcaaattcaaatttgaatcggatatataaacttttgatttattagaaaaaaatgcccgtgcgttgcaactgggaaaaacgtttttgggatacaacaactattagaagctggtcaataaattgaaccattaagaccgctatataatataattaaaaaagttaataaaaattattttttatttttttagccccgctcagtccactacctctctctccctctctctcctctcgagctgcctctctttaggctagctcacacatcgaggggcgtcttcaacctcagaaggcagtcatgtacctgtatgtctgagccaatcctcccctaaaatccggccaaatctttcttgatctcctaaaattgtcccatcaaattcggccaaatctttcttgatctctcaaaattggttgagggctatgaatcactcgatctaatcctctttccgttatcccaaaatcgagtggcggcactagtgcttgtctcgaatcgagtggcggcgctagggtttgtctcggcgatagatgtgcccatatgcccgagccaatcctcccctaaaatccggccaaatctttcttgatctctcaaaattggctaagggctattgattcactcgatcttctctttcctttttcatcgatctcctcttttcgtttttcacaaaatccaatggtgacgggaagcgcgtgagatggatcggattgatctggcaaaaaaagcggaaaaaaacgaaagaaagaaaaaaaagagaaagcatgatagaaaacagcgaaaaaaggataaaaaaaagggaattgctaagcacctgtcgacagaaaatgcatacccaaatcttgcaaattttgaatcaccggatgtgcttcgcaattcgtgctctaggtgcttcttcttctccggcaccggcgaattagggtcccggggtggggtggggtggggtgggaggggggaagaagggggaggtggccgggcttagagggatggccatgggaggcggcggccctgcggtgggtagcgaggcgccggtggtggcgccgaagccgcggggatggaggatggcggtgggcagcattggcggcgggggcatctctccgccagtggctagaggagggaggagaggggagagagagagggggaggaggtcggccggggggggcctcaccggcgcagttgacgccttccggccagccggcgaggccgggcggcagcatgctggggcggcggcggcggcggaggcggaggcacggtgcgaaactgcggatcgcgctagggagcggcggcacggtatcgggagaaaggaggatgaggaggtttttagggttggtttcattgcacgaattttaaattaatcgagtggtctagaatttacaagatttttagggaggttttctgtcaaatgatgtatagacaatctaaaaaaacgattttgctatatctcactcgaaagattttttttcttatattttctcactcaaatttacagtgcattttcttgtaagttacagtgtaatttatgaaacttacactgtaacttttgtaagttacactgtaatttttgaatcttcacatgtaaattttaaattgtattggatttggtctttttcttgaggatatgataatttagtgtctattatggtgtttcttaattgttttttgccttttattatatctatcggattttaattcaaagattaaaaatctgtgtgatacgatcataaaaatctttcgaatataggtactctcaaaaaaaaaactagaagctagatgggctctttgctcgcctctaatgcggactactcaacgctgacgttgaaaaaaaaaattgatcaatatataggaactcaatcggacagaacaaccaggacgaacgaaaaataggtaaatatatagataaaaccgattcaaatatgaatatgaatgatgtaacaaaattctagtaaaaacatctttaatttttataatagtagatagattttttttctccggtaatttttacgggattttttcttcatcgttttctagaccgcggtttcttttttcgcgtgactttttttttacggtcagttttttttcatctttttctcgccatttttttttccgttctagtccggatcggactttttttttcgctgtttttctttcccgttttattacgatgcgttttctttttcccctgattttttttcttcccttttgaaaattacggatttcaagtagtagaggttaaaaccgactcaaatacggatgacgtatcaaaataccagcaaaaacatcttcaatttttataatagtagagatagatattttcaccgtaagaattcgcttggatatatattttcatagaaaagcatgagctgtaattaggagtcgattatcttaagttagcatgcaagtatttttttaagagatttcttatatgactcatgtatttccaaaagcgaatgaacttagaaaacgactcatacatagatgacatatcaaagtaccaataaaaacatcttcaatttttataatagtagagataaacttttggtctttagatgtgtaaacttgagatgtataaaatttaggtgcataaatctatatctacatctatatacctaactatacctaactaaaaaataagtaaagcttaactatacctaactaaaaaataaagcttccggtagggttttctcgtccgtcaattttttttcacacgcggtatttttctcacgcacggttttttatccgattccggtttttttacgtgcgttttttgcccagtttttttgtccgattgttttttagtgggcccggttttttaattaaaaaataagtaaggcttccagtagggttttttcgtccgtcaattttttttcacacgcgcggtttttttatccgattccggtttttttacgtgcggtttttgcccggttttttgtccgattgttttttggtgggcccagttttcccccaccgcgtccgattttttttgggcccggttttttatatacaaaagaaaaaaaaccacaggaatccatgttcaccaggttcacccacaaaaacacagtagtccaggttcacgcacaaaaaacacagaagtccaggtcacacacaaaatatagaaaaaccagagtccaggtttaccaggttcacgcaagaaaacaatatcgcatacgagtcaggttggttcgcccacaccgttttctgcttctgtttgcccagcccaagtcaggagttagattctatcccgagtcagattctatcccgcttttctttccgctatatttagctagcactcccactaacgtgattttatagatttttctcgcaggacaaaatacacaaatatgatcacaggcaatacaaataatagaagcacacaagaaaatatagatcacaaggctcttcctctaggatgtcaagccacctccaatcaatgtcgattccaggttatcaatgaactcaaccctgaatgcaatttcaatttcattagatttataagattaatattgaataaaactagcaagttagcaacaggcatattttttagttgttcagcggctattttcatgacataccaccacaaaatctaggagttgcaaacccaaacatgaaaatctcttttttaagtggctttatatattactagaagaaagaaaaagtattggtaattgcagcaagagcaattttatgcagaaaaacattaactgtgcagacagatgaaccatcgtttaattattgcaatttttaatcatgctctaaaaaccacactgctagcaagtaaatacaacacgactagatgaatgtctttctgctttctttttaccttatgtctgctctgcttttattcttatttattggcagtaattacctgaatatttttggcaatcatctcgattctatacctccaacccatcaaagggtaataagaaggttcgcaatgcagcatgacattgccaattgcctgaaaacaatgtcatagccaacacttataccaatccacatcagcagatatccgtatggagctcttaaaaattccaaagcattacaacggagcatagcaagtacaataggttccaatttagccatgcaaccgaacttaattctgaaaaaaaaattgacctgatcatcataactctttagattaagaaagatatatcttgatgatttttcagaatttcatgttcataagcttatattattgttgagaaaggatccaattctatacacatgcataaagcaaaatattttaaatcaaagatgtgtagggaaattttatagactccaatgctaccagaagtaccttaaatcacggatgcattagtgagtctttttgcaataatctccacattcttcagcagagcactatcacgaacctcagcacactgataatttagatgtatagtccttggttccaatattgctatactgtccctgcatcatggaaacaaatgcaagtaagaaaaaatatccatcacatatcaaaacaaaagtttctttaaatcaaataaaagcatcatggcatatagcaaactaaaatttgaattttttttggtgctacattggtacatgtcagaattgagtgttcctaaacagatgaccaatcaggcatgcacattgcaaccaaaacaaagcaggaaaccatgtgatcagatattacatcgtaagagacaaaaaaatttggttgcagtagtacggctgtagtttgcacaaaatttgagtccatcgcctatcgctcgcgccatcacgatcgaacaaagacagagaggggagataccatgttcaacacgaaagagattactacaaccaaaacgattactacagattcgataaatacaagaaggattccactagattactacaacaaccaattgaggaagactcaattggtcagatcgaagccgcgtgaagcatagggcaacgagccaacgttggggacgtggtgcccctactcccacgctcgccttccactggatccagcaagaaggaagaagagggttctggcggttcaggggctgaagagagcatagaacggcggggggattgtgggcgccagtcagcaaggaagagaagattgcaacgatgaactcaccgtggccactctagatccgctccaccgctgatgtgggcagccgtcgtcgaggttgtcgcccccttcttccaatctgccaccccacctcatggccggccaggaaaggagagcaggggcgccggcaccatctagctcgccatctggcgagagtggggggcaaaggcaaggggtgtaaggaacgactgaccctggcttgctcttgcgccgccaccatcaagctcgtcgtccgatgaggaggggcagtggtggcggaggaagatggcgagggagaggtgagtgccagcggcacaagatacgccgtcgccgaggccactccgccgacccccaggaggccaggacgccgcctccatggagccctccgccgatggctcgcgcctcacgtctgctgaggggctgatctgaacgctgccgcctggggagagaggtcaccggagaggggagtccagccagatccggtggagatgggcagcatgctcctcctctgacccctcacttccagatccaacgtcgccaacaaggggacacactgttcaccaagcaccagaaatcctagaaaaagaaaagtaaaaagagaaaataaacatatgcgttctcagcccatccactccagatcaaaggaatggaaaaggaaaccatcacctcgctgtggagctgttcgagagggaggcaaaaccatggtggtgctagctggctttgtggcttcctgggatagagctgtcgatagagaaagtaaaaggaaaggtgagccgacgcttgtaaaaagcgtggggaatagagagactgagaagattggaataaacgagagacttctgctttccttttttccacttcccgtcggctcagctttttttttttatgtatttttttcttctggtctgtttggcttccattttttcccagtatatttattgacatttcacctcaaatgaaatttacaaataaaacacaatactacctaagaaaaaaaagaaaaagtttgaattacacccctgaacttttgggtgagtacgacttacccctctagacctaaaaaccaaacatctttcacccttaactatcaataccagataaaaaaccaccacgggtagctttataagcgattttgatcctacgtggcagtccagtcaacaattcttctattaaaaagttgatagggcccacctttcagatctctctcctcattatctatttcgctcctcattatctatttcgcctctcagacccctctctcttgtcagatgccaaggaggagacgcgtcagcgactgcgtgcgtctcacggcggagggccaaggcagtggccagcgacagtgaggaggcaggagtggcagagcggggcaagtggcatggtcttagtcgagccatgtctcgaggtaggcgtgatgcaatatgtggctgcagggagggcagttcaccaccgcatccgcctcgaatcgcactaggcagacacggcagttcgtcgtcagcccgtccccatcggccgccgagagagatggaggtgaggggaggaataagaagagaggggattagggaaagagagtgagaggggaggagaaagagatagagagggtgagagactaataggtggggcccgctgattttttttaaaaagaaattactgattggactgacacgtaggatcaaaaccacttcggcttgagtggggggggggggtaatttccggtattaatagttgagggtaaaaaatatatggtttttgggtttaggggtacttcgtactcacccaatagtttagaggtgtaattcggacttttcgcaaaaaaataatgacatcaatttttatgattcagatgttccatcaactctcacgagtacaatgcatggaaaatcgaagtataagaaaatatgatttccttgtgtcatgaactcgaatgttccttttaagtcaattccattgatttttcgttaaagtactaaaaaatattaatttttctattaatcacataaatttacatgtgtcaccttctatgcaaaaggagacgcattaatttgttcaccactcgatcctcgccattaccatcaggcccacacacataagaagcgtcatctacatcgtgcaaatataaagtaaattaattataaaaacaaacataatctttttataattgttcatatcgccgatgcttataatcatctcgtgtgctttggataaatcgttaatatcaaactttagccacccttcaatacctggtgcaacgcacaggcattttgctagtttactaaaataaaaaagtaatatggtgtcaaaaaagaaaaccagtgaagagagagggggaagggagaggggggggggggggggcgaatctgatcgatcgcccgttagaaatcccaaatggagaggccactccagttagatttagccgagacaaaagctcgtaccaagcggagtcggtccgaccagttgtccgatccaccgagtcggttcgggggtccgggtcgaccagttgacatacacagacgagcctacccaagactccaagaggcgagaaaaatataaaaacgacctgaatccgcaccgtcccctttcctctcgccgccgacctcgtcggccgtctccaccgccggccggactacgcttccccatcggtgcggccaccccctcgaggccttcacatcagcgccgccaccaaccggttgcagtatcgctgatctcctcctcttaccaggaggcaagatggtacgtgggagatctaaccctaaaggccgctctcgattcgatctctccccatccccaaatcgtgcggggctcgcctccagggcttttcttctgctggcgagtccagtttggggctctggttgctgacacgatcctttgttttctttccctgcgattcgattgattgacggatttatgacgtttctccttgcagtcgtcgctcgccgcggcaagggcggataacttctactacccgccggaatggagcccaaagaaggtacgcgtctcttcctcggtgaatcgtatagcgttttcatttggttttgatgcgttgtggttgctgatgcatgtgggtgtttttcttctttcttggaacaaattagggtgggctcaacaagttccatggacaacatgctctcagggaacgggcgaggaagctggaccagggcatcctgattataaggtttggttgtctaaaaatgctttttctttgctctacacagtgaaaaccagttagagagaactgctatcttaactcatcgatatggctgtgtattttgtacgagtttagggatatgttaaaatggacaaaggatatggattaacaatacaggaacgattttggatgttgtctaaataaacaagcggacaataggaggaaaatgttattggtcctagtaaatgggaattttggacattggccatttagatttttatggatcatggtaacgtagaatgcctaacagttaaccagagaatagatgattggatattttagcctttgccattgttgtggttagctattttatttatttccttttgctttagcgattctgaaatattggatttgcaattgcaaaaatagtttaattgatttgatgattgtttgcaagtatttttggcatctgcatgaacaaccggacaatattattgtactgaatggatgattaattatgatgttgtgaacgattaatcataaacttgcagagaatatttcatcaacatctatgcatatatcaagcaccaacaatcgctaataaaatacttatccataaaaacagttgtttgtgaggtttgtttttctaagcatcattaaaattgtaccatagttgttactattcatgatatatttgctaaacttgattactggcaaatgaagaaggtccattactacattataatttgcaaaagtgttaataaagtatgataagtcccctcagacaaatgagatgataattgatttgagtttacaaactttaacatagaaatgatactatggtgtcgacatgattattccatgtgttcatacctttatatttgatggcttgatgctacaactatctattactgcctctgccaccattatgtaagtaaccatggtgaagatagatgcatctgtagataccattgttctgtcttccagttaccgcttagttttgtcatagtcagctaataatgtttagattaggaaacaactactttctgaatctatattatctgacagaatgcattttcattactagtctaacaaattgatggcaagtacttttgtgtacattggtcacttgatgctagctaggtgatgtatgtagtcgagaacaatgtttagctctacagatctagaagataaaagatacataccaatgttgatgtcctcttaatgtttatctacatataatttatcttctcaagtgtatgttcaagttttgactctcttaatttgtttatctgatgtgcagattcgagatgccattcaatatttggtgtggtgggtgcaactccatgatagcaaagggagtgaggtttaacgctgagaagaaacaagttgggaattattactctaccaaggtatgtcctggattggactaaagttcgtctgaagtcgaattactttgcagctttgttttgggagtattgtgctgtagctatccttgttagtttcagtggcggaccttctcttgtggcaagggatggcgccggccatacctatgtcatgcccaaagtaggtagggtattcaagcatatgaccatctcagccttgatttcagatgctaattatatgattagttggctgtatttcatttggtacaagcttattcgtttagttaactggaggtaaagacctatagtgggactgccttgtgtctgcacaaatgaatgaatagtctagctaaccacaaaatgttaatcggtaaaaatcgaatgctaaaaaatagatatgtaacttaagtgaatgtctacttataaataaacacacctaaaaaacagggaaacactcgtagaaatgtagtttagtcataaaagttacacaacaaatttaaggcttcagttgtaaaaactgcatgacaaatttaggattataatcatcgttaatggcatatattctaataagtgcgaacatattatagtttgtgtataataaaatgttacatcatttttaaaataccatgcacttcgttcttgtgtgatgatccgccatagctaaattttagtgctgggtccgccactggttagtttcagctttagttttggtcccatggatagatgagaaaactgtaggtgcataaactggtgtgctttatccattcaactctatttttcatcaactcatctcctgcatggcatagcaagacataagctaccatagtatccattgataaggcactactgtattttatttatccattttattgtgagtttttttgtttctttttaaaaaaatgatgggtccacatctgccttttgaatggcctatcctctcctatgactacagtagaaaacacaagatttgctgtgacttaggaccagggttcaccaaaccgctttgggtggggttaccgtcaccccatggtaaggcggttatcatggtaaccatgcggttatcatgaaaaccatgtggttaccgcgaggtttaccgtggtttcaaaaattgagaaggttactgcacatgataaccgcacggttttgtaaaccctacttaggactccattggttcatcatctgaaacagaataggtgatcagtcagcacccactctatcaccaatagaagtatattgccatgttgtgtattgactaatggattgtagtcagcaactcagcatactgggtagtggtcttactgctggcctagccttataagcagagtcatgttcttttcttggatatactagcatagagtgtatcatatttattcgtgttacttcaagtaaatccttgaactttggagctatttaaatatatgatgttttttcttatgccttgaaatttggactcgactcctgagtatcacttgtttggtggttttgtatcaaaattgaattaattgtttttcacctttaattaaaatgctactcaatccagcataaatttcatgagttatagaggtcagctttccatcatattccctccggttccataattcttgatgtttcggacaaggttgaggacaaagaattagaactttgacaatcaataacttttaaaatattcagtttgaagacgctagaacacaatgtatagattagtcttaaaaatactttaataaaattaaatatttacttgtcttgtgtataatattataatagaaaatcatagtcaaagacatgttttggagactgcggcgttgtccaaaacgtcaaaaaatattgaaccggagggagtaagaaactaaacagagttcttaccagaagttggtgtacacaactgggtaaacatttttctcgaagagatcaaatggtggtgatttgaaatggagtcgttctaggtaaatgagagcaccatgtgggggaggaatggatctgtaatagctaacaaaagaaagatcatggcaggagtatgtcgtctaggaagtttgcttattcattacatgccttcattatgagatcaaatgccttccaatagaaggagaaatttagcaaacattagctagggtactatatcgaactaacttattctaactcccacaaaactcctacctaatagatgcataacttacatcctttacatggcccaacgccccaaccaaaatcctgcaatgccttttatgctattagcttgctgctggcaagctgctgcctgcctatggctacctaccagtgttaaacttgctgtccgggaccacatccaaaatgtctgggatatgataatgttgggaacaggatagcgcttgtccattgttgcatgtgaaaactgtgtacggtattgtacagcaactattcagcctcatgctttcaactgtccagactgaatatattttttatccttggagattgttattttagcccaggacttttcgctccttcacgaaatattagtataataaagttaatctgacaataatactagccatgctttttggcaacctgaaagaccttaagaacgtaaaattttattttagttttcttgccttttttggttacatgtatggaacctacgtaatgatatacttttggtttatcatattcatgagccttggtattctttttaaagtttattttatcaacttagttgatcataacaagtatattttgtgttattgacagtacaagttgaatatatcccataacttctgctttttaaatcgcccttgcattgaatgtgttcattgttgttgtctcaccctaattactagaaaaaagaactgcgtgcagcttgtgcactttaaccatactatgtcagtcgtgcttttcaactccaaaatacttgatgacattatttttattgaggtacttccattcagggaacgagcttctattgcataattgtgtgagctgacattatatggtgctaactttgttttgccaatgattcttgtgtcagatatggagcttcaccatgaaatcaccatgctgcaaacaagaaatagttatacaaacagacccaaagaatactgagtacgtcataattagtggagctcaacgaaagactgaagattatgatgtggaggatgcagagacactactgctacctgcagatgaaggttcaaatacttgcagaaattaatctggcactcctatttatgaagccattgttttaaaatgattacttgtctgttgtggatttttcttcagaaagagacaagcttgcggatcctatgtataagcttgaacaccaggaagaggatcttaaaaagaagaaagaagctgaaccagttttagttcgccttcaacgactctccgatagccggcattctgatgactacgctcttaacagagcccttcgtgatcgtcttagggtcatccaatgaaatcctttatcatattttttttccaaaatagttatttaaaagtgtcatgattcttatccacttgtcctatttgtgtagagccaaaagaagagagttgctgaagagaaaagatcagctagaaagatgggacttggagtacggcttttaccaccctctgcagaagatgccactgcagcggcttctgtgaagtttgcatcaaaatttgagaagagcagaagggacaaaagagcagcaattaaggctgcttccatcttcccggagtcatcaagctcaacttcaaagaacaagctggatcttgcactgaagaggcgaaatataaaagctggtgctgcctcagcgctgatggcgagcagggtgaagccgtcgtcatggcagagcgccggttctggaagttcaaggactcagatgccgatcatggcaacacgtaagtagccaccccaagaagaaaggcatttttcttcttctggaagaagaaataccatctgcttagctgcgccatcagaagttaaaaccagcttgtttcggttgtttctttgctccagtttctgtacgagtatgtgtaatgtgtagtgtataacttgaaatctttttggctgtatgcattccggtgtccagctcatgctagtcggtttgttacattatcttgtacactaagaatttagtaatctttgtatatatgtcatgacgtgtcacactgtatgctcgcacacagcgacgaatggcttgcgatatactatctgaaggttgaagaataaaaactgcttgatggccaccgacgcatggcggattcttgtgtgcctgaaatttgtagtacctgtactggcactcgctttacgagcagccaattccaagacgtgacatgcctcctgcagctgcttgtcctgctgctgatggagacgaatttgccgctggctttttatattttgcttaaattttacgagaatactattttaataatagttttatagtattctagtagtagttttatagtagttttgtaatagcaatttctccaatctagtttagcaaagccaatattctggatgtgtgcaccggtgagctgtgcatccgctgtccatctattctcccttttgtatcactcgaagaccgccgttgctgcaacgcatatactactacgaagcaagtacagattgccaaacctaacactttgacttgcatttatcaagtcacaaccgcacccatcgccatgcttatcaaccctgacactcaaacacggcgatgaaaagaaaaagagattaattttaaacagtcctggccgactctgatgagagtctgacctcttcgatggctcaacagcaacggaggacaagtgagatacagagaagttgattgaatcgtatgtgaatgccttgacacctgtgatgacgactctgaccttaacatggtacctcactctgtggtttgtgcatctctcctcctccctttgtgtagtgcagcttcctatctagtaatagctgtttgccacttttgcctacacacacgcccaaagtcaaaaccggacgttgggtgaaagccagcagttccttcgagactgatcatggaaactattaaaatggcaaaattaagaagaaaatgtcgacatatatatagtagtacttaaaccaaatcaacctcatgaccttaatttgtacctccaatattttaagcagaattgctcgtacctccaacccccaaaaggtaccctccagcaaccctgtgcccgttcctttcgcccagaaatatacaccgaaaccgatccgtcccaagtttcctaagaagaaaattttaaaacgacatgcacatccaaaatccaaaatataataaataatgcaagcgcacgtacatcacacgccgttgttaatgcgatgtgccatgtaaagactagcctgattgcccggcctctaagcgagccttatctagcgacagatcgatcgatcgatcgaccgaccgagccaatccatccacccgtgagaaaacgaaaaatcttccgtcgccgcgaagccaccgccggcccatgcgatgcgagcgcgcgttgacgacgtagtactagcatatacgtagtatgatatgcgcgcggccgggaaaggcgggtgagttccgcgtcgcgtcctcggctcggcgcgcgcgcgcgcgcggcgcgggtggtttacgcaagctgagctgccgccgcgcggcttgctagttagcgtcaaatcgatcggttcgagccctgcaataggagtcccacgcaagcaactccttcctcctcttaaccacgccctctctcaccgtcgtcttcctcaattccctctacccctcaccgcccgcacgcgcgcgctgcctagctaacacaaaccgccattgcttcccctcctcctccttgccgccgtgcttagcttgctgtttgtagcttgttggctagagaggtcgtcgtacgccggtggctggcgatcgccggccggccggtggtccatgactaacggtgccgcgagctgccagcctgcagcgcggtggacatgagccggcgactcggcgccgcggccgccgtcctcctcctgtggctcgccgtgctcaccttcgccttgcacggctactacggcggccgcctcggctccgcgaggcggcggaatatcctcctccaacacccggcgctagcgctccatctccccaccaggaagatgctcctcgccgtggcgagcttcgacgacgcctcctcgccgtcgtcgttgacgaccaccgatcgtcatcatcaccatcacaggcatcatggccaccaccatcatcgcggccatgatcggtggaacaggaagggtgtcccgccgacggcagctgggccgggcgaggaggtcgacccgcggttcggcgtgcagaagaggctggtcccgacgggccccaaccccctgcaccattgatgccggcggctcgccattgatgggtgctcgagtttttctgcggtgagtcacgcgcacatatacactactacaccgttcttgttgtgttcatcgatcgaccaaaggctagctagctagctagcacagtaatattgattccaattccaacctgtggatgaattcaagaaagcattgccgatgtgtgtgtgctcttgcatgtatgtaccacgatcatatcagaaagcttcaaaacaagaggagaaaaagaaatgttactagctatagtacatatagtagttgtgttgaggagagaactaattaatggatatgcctgttcctttcaaaaaaaaaatcacatcattctttgctatttgttgtctagtttaattatctccattattacagccaaggcatcctttggaattaatgtgggattttatcctattcctacataagccgaactgatcactattgttcatttcttgtgtttcaaagaaggcggaaatatgtatggaataagaaaaaaataatgatatgcgcatgcagtgcacagtcgctgtaacttgcagtaaactgtaactatctcagctgtacatgttgctagctcaagtggcgtttttgcttcgcttcttgggaaacggtttcatggtcgttaagtgagttgtacgtcgcagggatggtaggggatagatcgatcgatcagattggctgtaaaaatccgtgcaaaaaaggatggatatcgatcgatcgagtagcagtgacggcacggcatcgcatggacgatgcacacacacatattagtagtagtatatggggtacatggcacagatcaccacatgtataacccttttccccaggtcttgatacccatgatagttttggcactaagcgcatatacatggagccaatagaataagccggtttgacttggagccatcgatcgatctcactttaattttagggcacatgcattacacatatgcagcaagcacacgcgcctggcacatgcaaacagctaagctagcaaattactcctagctactccctccgttttttaatagatgacgccgttgactttttctcatatgtttgactattcgttttattcaaaaattttatgcaaatgcataagatataaatcacacttaaagcactataagtgataaaacaactcataacaaaataaattataattacataaaatttttaaataaaacgaatggtcaaacacatgagaaaaaatcaacggcgtcatctattaaaaaatggaggtagtactactcctagctagttgcattgtgtgcaaattaaggaggttagcaaaaagggagcagtggcataattaaaaggggttttttgtcattcatgaatgtttgtgtgagatcatcgagttggtgtttaataatgtggaatcatgtcaaataaggtggcacggagtaattaagtagagggggtcaattggggatgatgtgacactggaccaaactgggtgaaagctagctagagccacggggtaaaaatgtcgttgttgcaacgaccttcggtacaattgctcatctacatgtgttaatttatagctcacgaaaaggcatatacggagtagcatatagctttgatgtcgttaaatgatgtaaaaaggtgttttgtttgtttgttaatttgtttattcgcgagaataagcatgtaaactgtttgagtgttaaagaattcaacgctaccatcaaattaattaatgacgcgcgcgtgcggagagagatgaagcagagagtgcagcatgtgcacaactactcacaatcttgattttgatgtaaatcgacgggaaccctatttgtaaagttttattcctaaaatatatataccctatttgtagttttattcctaaactatataggaacctagttcgaagctagtacgaactaactcgattaagatcaggttttagtttcgtgcaaatataatcttttagggctattaattgttttctgttgacttacaatataggtcatttagatttgtgcacaggggataattaaggcagtgatatacagattttgttgcatatatagtcactatcaaagaatagatactaggtggtgtttgaatataatgaagatgaagataaaagattaagtctttcacgtaaaacgaggtggtaattatgtgtgattaattgagttttaataattacaaacttgaaaaatgaattaatcttatattttagaacaactttcatatagaaagttttcgcataaaacgcactgtttagcagtttgaaaagcgtatgtgctacgagtatccaaaagtttatccaacattttgttggagaaaagaacaggcatatagtacttttcccactatatatgccaacatctcacttgtgtctaaaattaaaaaccggtaaccaaataatataaatactagtttttctaataaaccatcacctatatataggataaaagtgttggtttttaaaataccagcacttagatggagccaagccgaaccagtcggctgcctctcgctctattcttgtcgtcatccttatcctctctctcactccatccctctctcgctcacccttcgttctccgccacctgcacagcacgcctcctcgctcacaacgtctacgccgcctaccttggttccccgcgtcttcctcctcactcgaaacatcatatcctctgaggcacagctgccggtccacctactcgcccatatcgtctcctcttctcttggtagggctttctatcctcttcctttacgcgcaagtgggaggtggcagatctggttgcctagagctcaactaccgccacggtccacctccgagtccgcagcatctcctcctctcttggcaaggtaccctctccacttcctctttgtgggagaccggtgcacaagtgagaggccgacaaactcgtgggaggtggcagatctggccgcctatagctcaatggtgccttgatgagcaggcagtagtggcgagcatctggaggtcgaggaggatcaccagatctagttgcctagaactcaacagccgcttgatctggccgcaacaagcttggggttagccaaatctagatgatgcagtcggctcaatgatggacttcacccatggcaaggaggacgactagaaaccctagccttctgttcttcggcatccttctctctgtgtatattcttccattttggtgttgatatattgatgttgattttgtgattgtgttcttcgctattgattttgttgttgatataaatatcggttgggaagtcgatcgatctcggggcgatgggacttccatgattatgtatttttgttcttgattgatcgatctcagggcgatggggggcgcttgaaacatcagcttaatttgagccgatgaatggaggaagccttttcttttcatttctagaacatcaaaggtgttggtttctaaattggtacgtttgattatttccattagtgccgctaatggaatatcggttgagaaaattacacctatatagggttactaatcggcactcacgatgtgttctatactagtgagaacatcttatacgtgagcactttcaggatgggcgatggaagagggacatgaaaaattttaaatttcaacccaagctagtacattatgtttcagaacctcttccatttcttccagctgccccctcttcttcctccactcattctctagaatagttttgttaaattactaggctctgacaaaattcgatgctaatcatggtgacctcatgaaccatgggttatcgtgaaaatatgaatacccgttgcagacactaatttatttttactttataaagaatattccattttatagcaagactcaattattcttttcagatttaggcagagagtgccacaaccgttgctagttaataaccttcctccgtcatattaatgtgtccatcttatgatcctttacatagcttcagccataattggttgtgcagttcatacttattcgcgtggcagagcagcatataactacagagaagcacgtgagttttagggcaggcctaactgagatgcggttcaagaaaactgcaatgttaaatgaattgcaaagttcctagcgtaaagtgaaaaggtagaagtagaactaagcttctagcattagtttttttgacagtggaattcagcctggcatttactttagagaagttacaagataactactaagaaaaccaccttaaagaccgatatctctatatatggttggacagagtatacataatcgttgtttctaacaacttgaagttgtacgtagctcttgtcttcctcaaaccaaaaaagcataatctccaaaactagcggtcaatcctttgtcaatcgaattttgcatccatcaccatttgcaaactgacgtcaaaccaaagcggaagaaaacattagagaatatctaacctatgaattagtcactagcctaaatcttaccaccaccattgccatcgaacccaatccaacagggacaccaccaacaatgaacctccaatgtgacgcctcccataagattacgatatcttgaatatcaccatcacaatgatggaagagagtcatgacatcacctccaaaaatatgtgtggcgtttataggcgtcactaatgttggtaacggaagctcgcggctaccatggctgcaactaaccggatcagtagaccgattggctggagttgtctgcacccatcgctaccaccagaaggtgagtgacggactcgatggcgattgggaaagagcaaggcggccgtagcctgcgactacatccgcccctgccacgtgccatctcccatactctgtgggcttttgggacgagacgccgccgctgcctcctcaagaaacaaaataaaatatattgttttcactagcacaaagaacaaatttgctacaagttcataacctctgcacaaattctctactaatatatagcattcaacattcatcgttttgatctttttttcatttgaaacggttgacgaattgttgggtacctcataacgtcaaataagtcaattacaaagctgtagagtttttcaagatatacaaattaacttttatatatatatcttgtatccatttgaattggttcgtaaaattaggagtttctagacaagctgcttacacttgccacaattgttgcgaaaagacaatgataaagaggatctggattttcttttatttatagtggattattacaccaatttttactttcaaacctttcaatataattttaaaaataaattatctagaattttatttaaaccttttaatcatgcaattatttataatgataggacaacagtaccatataggtgaaaacggtggactagctagcattttgtcacgccactcacaccataaacaataacactacattaacaacattgattgccaccctaggcaagagatttatttttaagggtttgttggaaccatgccaccctatatttgtaaaatttgagatatgccacccgtatctcaatgacatgtaggacccacatgagtcaatgacatgtgggtcagggtggcatatcacaaattttgcaatttgtgtggcatggttcaaattgtccctattttgaaatgtaacttttttagggtttatttctaaaacatgaattaaaaaatactaagaaatataaaattacatgctgaaataacccatttattctcgagagtgatagcatttttattagcacgacaatgaaagggcaaaagttagacaagtggctataaattcaatgacaacagcataacaatttacgtttagaatgggtagcaatacatagcaacaatatgtaaggctttttgctttttttttctctgtctttttaaatcgaggtgtttcagacacaactaataattagttattgagaaattttattatacatatgctatcaacaaatattatgggcatgtttaattggcaaaaaattttaccattatatgtcacattggatatacggacacacatttgaagcattaaacatagtctaataacaaaaacaaattatatattgtgctaggaaactgcgagacaaatttattaagcctaattaatctgtcattagcaaatatttactgtagcatcatattgtcaaattatggcgcaattaggcttaaaagtttcgtctcacaattttctggcaaattgtgtaattgttttttgtctgcatttaatgttccatgcatgtgtccaaacattcaatgatgtgaccgcgtgaaaaatcttgtttggtaactaaacgggcccaatgttttagaaataagctgatgacaaaacctctaatcctattatatgccatatagtactaattaacactgatgagtcatttgtggtgcctaagggtagtcccaaccctccacctaggatggtgtctatggtattaactacattgccatgtaggacttttagcttatgtggcactatattaattaagagagagagagagtgaagagaggaagaaactgggtctcatgcaagacacaacttcaacacgagaacctatgcactagacactatcaagttttgcattgggagagaatgatgtcttcataataaatgaagaataaatatgattggtagagaagatagatgatgtatttactaatggcccattttaagaaaccatgggttgtagagtgtagtttctattatgatgtcttattgacatggtactatagacactacttatgtacatcatgggttgggactgcccaatggccaatcagtggcgaatcagtctttttatggtacctaattaatgtaattaaatttgacataatcgtacacaataccataaaagaagaaaacaagagtactaaccagtgttgggactgcccttaggcaccacaaaagactgatcagtgttaattagtactgtcccaaacctgtgttagataaaaacatcctttatcatgcgtctttaattaccttggttaagagataggaggatcaggggaattggggggtcaacaaaacctgaaagttatatttgtactttctgaggttaatgagactactctatgtgatatcagctcatcaaccatggtatagttgatatgatcaatctcagtcattaattaattagcatattataaattgatgtactggtacattcgttgcattattcttctgcagacgagacgacggtgccggtgcatacggacattttattagtcttctcaaggcaggcggataaataattgatgtgtatagccgaaggatggttgtttagttaaagttggtaatgacgagtacgtcagcacgtaaaataaacaaacaccagtccgggacgacagggtggagttgaccgcacagcacttaccagtactaccgtatacattttcctgattttgctggttagctatctcctcataagagcaagtttaatattaatagtagagctcactacttacttactattagtcaatattaaacctaacatgtatagtagattggttataaggttatctttattttcttcatcctctctctttttctcaccatgaatttaatgcatatttcttggagtttgtgtgcagttagctcttgcatgagagccaacactccccacttttttttatctctctcttccacataagtatatagcctctaatgattcctttgatctaaacaggcgcccttaatttaagagaacagcattcttcaattatgcataaacaatcagcaaaatatctaacaaaaccttttcaaattgaaaatccatgaaaaagccatatatttgcacatgtatggatttttttccccaaaagttccggtacacatatttcaaatatatttagtttcatattagaagtttgtttgtacgtgtgaaaattttgtgtgaaataatcaaaatgagccataaatccttgataaatagacaggcgaccttaaatatttctgttgtctttagggggaaaaagaactgaatcaagcgacagcagctataagaagtaatgtcaggctaacaagtttcagtttcgccatgtttggaatttttagcagctctatgtttgtagtgattgtaccttcttctgaaacaaagacaggatgttctttcattatctaaaaaaacaagtttaagtactctaaaaaaagggtggtcacgctaatgtttattggatttttgcaccaatggaccaaaagaaaatctagactcgaccataatcagaccggtttgtggatttaagagtcgtttcgcccttatatatttaatttctagtccatgtaaatggttctatttctctactactactaactgtcatgctattgaaatatattttccacccatatgtataagtggttatccttgaatctagttgaccaattctagttattatttttcatcttgcaatttatgctagaagtgtagtccacaaaagttttcagggttcccctgctttatgtgcaattgttttgagaaccaaagatgacatatttcagataagttcttgtcagttataacaattaagaaatatagttcagaggagaagacatgcaggttactgtccaaaaagaaaaaaactgagatatgtctacgttcagtttttctttttattttccgaatcaattttccatttcataatctgtataagatgcttccagcaccataacaattatgtaatgctgcagagttcaaatagcaaattttatgtggccaataacaaagggtggataaaattttagatattcgtggcacgcatttcaaactgctaacggtgtgtttcgtgcgaaaactttctatatgaaagttgctctaaaatattagattaatctattttttaagtttataataactaaaactcaacgtagtaacacatggtcgttttagtgaattatgcagtttctagtggtgtgaaggggattgaagccaagtgaattcctttgtggccaaaatgacagttggtgttcccacccatatatatcgtatacattacctgactatcacaatttgatgtgttctgcatatctaatcaggttagactggatgttggcatgcaaaaagatcgtgagggctgtcaaatccaattttaaaatcctcagacggtaaatctaaataggatcagtttgtacaagtagttgtaaaagttatggaagtttcactatacacattctaaaaatatttcacaacagcaatttatttacaagcacgtaacagatagaccgaatggaaatatttaactatttgccactcttacaagtgccaattaaggatttgacactgaacccatatatcatagacacatgaggggccatatgtgaatgatagatgtcacgatgtattaatgtgcctgtctatgttgaccattatgtaaccaggtccgtctagctgttgttggttctttcgatacaaacttcatagacacctgctgttttaagattaaaatttggcattatctaagacaaatgaaacaccaataatcccattttatcgcccatgtggatgcatcagcctaatcagattctgacatgatcaagaaaattatggcataacaggtatgacattccgcaaagcaaggggctaggtggtagggtgactaggaagattacatgtaacaaaacaagctccggtttagctctgtccacaatgataggatctagtaaaattaaaagcgtggtaggtacgggtgataaacaaaagtagagatgaaaaaggataccaaaaaagaatttcctttacctaagcatattctattctataataaacgaaggatttaaacaagttaaccaagctgagcaaatgtctataattcaaatgcccaaaactttaatattgttgtcccaagtagcaaatacccaactaaaatgtttggcatcaaaactttctggaatacataggggagcaatctaagcaatcatcttcaagcactttcgttcacggggtactcaaaggcaacatctttcccacaaagcctacggtagactgcaaagaaggtctccagcttgtattcgatattgttgcgctcctttggatccaagaagatcggaaaaacagatcacaacaagtggatcaatactactctgctaaagtagcaaatagaatgcagtgacatattgctggattagttacagtgagctgattgtatccatgtgaggtaaacaacaacttggataatgaaattgtggtacatcatttcagtggttgtatatcagagacaataatttagctagtagactactgcagatgcagtgacagatcagcacaataaagtattaaaatgatgattaaaagagacattatagaaagttgtagcatctacattgatgaccttgcaccatctaggcgatatctgatatacttcccaacaatctcagctgggagactacatcctccaagattccatcatgaacagtaatcaaagttcttgtacgaggatgatgaacagctgaacccttattgagaggcctcacaatcctccttgttgcatcaaagaccacatcctattgaagtgaacacacactatcaatacaaattttccaactaatagtgaaattcatcaaagaatggttcaaacaactatctggaaccaaggtcatataagcttagcatgaattgacaaatccttcactcaaaaatggatgtaaaaaaacgataagctaggattttgtgaattaacagaaataactatctattttaaagctctctttacaacaattttgatgatatcctcatagtaactaaaggctaccacaagcctcataacgagcacataagacatttcagagtccatatggacactaacaacactatactagtacaagaatgccaaatgccttggttgtagctgaaggcatgtttcatgaatgaaactaaaatgttgctcaagacttggtgccatgttctccaagatgttgggtgttatatactaacattgctatatggcatatttagcgctaaagggaaacattgtatatttagtcagaccgacaacatttatgttaccagttaaacaatgcacaacacaagctatagattttgcagtctgatagacaacactagacattatcaaaatactagcatgcaagctatgtaaacaagtaggcaactaagaacacgcaattcaccttgccactgaacttcttctcaagctccttgacaagcctaacatggattttcttgaatgccttgcacagatggtacaacacatggatcactaccaccttccaattcgcagcaacatccatctggctgcacacatacatccgtggccatttcatatacatccgcagccatgtcacacacatccactagccatcaaaaagcatgctgctcacaagatcaatcaatcgggaggcagagaatggccactcacactgcattgtggatgtagatgtccttgagctcgctcttgagctaatggtttccattctcgaggtcaaagaaaaagcccacatgatagcagcagccagccataagaagacaacactttggctaatccaaacacatacgagctctagagaacaaacaaatgaaatatagcagcgtgacgccactgcaaggggggagagacaatggagaatgtgctctcacctgagtgacggagtcctcgaactcggagggctataggcccttctccttctggatcttcttcctcgcagtgtacatcttcccttcctctaccctagacttgccttgccgtgagattcaagccgaagagacagatcgggaaactggcaagcacggagaagatgggttggcgtatcggaggcgaagacgagatgtacctgagcagtggaacgtgaggggatgaggatgcagggaagtggaggcgccggcgctagggttcgaagaggaggatggtggagcgttgttatatatgaggacgatctctcatgagatgggccggacaaggcatgggctaatggtcctggtttattcgtttgagcttagaaataagtctgttttgcctacctcatgtcttgctcatgattgagtcacctctctcaactgtaaaattgggtataacatcttcctcatctttgaaaaccagtgcaaatcgggtggttttcgaagcgatttctgctgatgtggcagtttgactacaattgactcattaacttagctggtgggacccacatgtcagcaactttctcctcttctccctctcctctatctccttccggtggctccgtccgttgcaccgctgctactgcgtcgcgcatgtgtgtgcaccgacggaaggaggtgcttgttaattcggatggaaaacttaagttagcaccagagaaactaaactgcatgaaacctcgccaaattaactagcaataggttcgctggccggttgatcaaacactagtagagatggtgagacggactacagcgatgacaatgacaacgaagatggggcacttgcataagttaatgtgaccatgcctactatagatagaaccattgttcgcatcatacatcaacatgaagacaccaagatcatgccacgcaatttctgggaatccaatttgttcaccagcaacatcgatagtttcaaacggccgctaaatttgcatatgagcttcattttggcctcaagagaactcattggaaatatatcatcgactaatcaaatgagcctagcctcaccatcaaattcgagtggagttgcctagaataataaaaataatattcggaccagaaatttgggcttagaccttgtattcacatagcctattaggggtccacaaagactagggtttgctccctaccaccccctcctggtcatccacctatataaacccttagcaatcacctttgtaacataggttttgtttatatgtaagtttagcttcagctacttccttgtactcgcatgtgtcggctagaccacccgtatacctatatttagaaccccacattcatgtatttcaatttcatcaattgacaagtgccgtgagttctttccttatcaatttgttcttgcttgttattttattgcttgcaggttcaatgttgttcttgacacgacaagaatgacaatggagtggagttggtgtaccggttgctaagacgtagcacccctatggtagttgtagtcagaccgctaacatcatttcctcccccaaatcgaagttatcctctccctcattgaaatatcgggaaccccagttgctgcaacatttgtggtggtagtggtggttgccatggcggcgatgttgccggcggcgtaggcatggcagaactacatatgtgagtgcgtcaagttgtgcatgtagaagcggatcccgagcatggaggcgcaatgcgcgggcaagtgcacggagataatgatgggctaattttaagcaccttcaatctacaatatcacgtgcaaaaatgggagagagatgaagattggagagaggggagatggggggagagaggaggacgaagagggaggagtgattatgacatttggggcccacgtgagccccactattttttaattattttgtgtgtgtagctgacatgtgggtccacggtttttattatttttttgggatcgaattgccatgtaagcgccacattaatgccacgtgggacgaataccttgtcaaaggaaccacgtaggcgccacattgaccaaaatggccttccaaaccaccttgggacttatgttgcaccagttttgacaattgagggagccgttgtatctggtttttgggttgaaggacgaaaatcggatttgttgacaagtttagagaccagatgaacttattccattcggaaattgttgcggcacgttgctccagctacatgggcctcacaggctcatggcccatccagatgttttgtgcttcttttggatgcaaatttgttttaaactaatttgtaaaaagtttctattacctaatgatttttaggtagtacatttctatgcaaagatttttttctgtataaagtttatgtgtataaagtatctatgtataaaatatctacttataaattttatgtgtataaagtgtaaactttcaatgtataaagttgtatccatataaagtttctatgtataatttttttcccattcctacttaccgcacctcataaatttaaagggaaaatagaaatgtaagtcttcgggctaaaaatcgttattgactgagccttcgaagcaaaaaaaaaaaaaagcctcacatagttcggacttgcgagtgacatgaatagagcaaggaataagtttaccgaaggtccctcaacttaagagcgagatttttttttagtcccttaaccacaaaactagaaatgtgtacccctaaattcacacaaaccatgccctcaaggtcctatggcagtatatatgggtggtttcgctgatgtggcattctagtcagcaaaaaaaattaaaaaatgtatgtggggcccacatgtcagctgcacatctttctccttctcttctctttctctcttctctcttctcttcttcagtgagggaggccggcaaccggtggagcggtgatgggcgagcgtggcagcggtcggcgggtggcgggcgaagcgacggtgggcgagcgtgggagcggagcggcggtggtcgagcgcggcgacgggcagagcagtggtgggcgagcgcggcagcgaagcggcgtgggctgcgggcggagcggacagcgggcgagcgcagcggcggcagagtagcggggggcgagcgtggcggcggtggaccacatctccaagaatcgccacaggccatggcagtccgccgctggcgccgcgtggtgcacagccaccccgaccgcaaccccgtcctcgtcgtgctcctcctcttcgtcgacaagcctcccgaagtcgaggtccgtttcggggagctcccccatgcttggctgccaccaccgccgtgcccccgtgggtggccgacgatgctagcggcaacaccggcaggagaaggggaagaggtagaggatggagaagatggtttcttggtcgccgtctgcttccctcgcgcgtaggccgggcaagctcggacgggctcgccggccgtctccccctccctctcaaaccgctttgctcgccatccgccgaccgctgctgcgctctctcgccgcctaccggctctccacccgccgccagcatccgcgctcacccatcgccgctccgcccgtctctggcctccctcactgaagaagagaagagaaggagaagaaaaaagatgtgcagctgacatgtgggccccacgtacttttttatttttatttttttgttgactaggatgccacgtcaccgaaaccacccatatatactaccataggatattgagtgcacggtttgtatgcgtttaggggtacacatttatggttttgtggttaagggatctcaagaaatctcgtagttaagttgagggacctccgatgaacttattccatagagcaaatgatcgtgggctggcccatatcaacaaagaaaccaagaaggcaattaggcttttcttctaactgggctgcgacttccacgaaagtgcacgacgatttttatagtttctcgttcgctcgcgccggtgaccgcgaacactcgtgcatcagacctacacgagcgccaagcatggtagatggcgacatcacatattcacatctgacctcgcttcccgctacgctgcaggttcaagatggatcgatctagctagcgacccaccatccggtcgacgcgcgtgcgtgagaagatgactcggggaactgctcgagctagcggcgcttttgctcgcgcatgtgccactggaggaaacgaggatattctcccgctcccgaacctgttgatcctgcagaggaaggcaccacgtgcatggcgcctacctttgataagatctctccacgtacagtgtggagttagttcacgctgcgcacgtggatggtgtggtcatgggcgccgcgcatggcattgctcgccgcgcggcgcgctgattattccctcgatctgtgctctgttatctcttactgaaaaaaaaaagatgaaataaaaattaaaccagcacctgcagctacgtgaaactgaaaaacgcctgggaaaagagagtcaagtgctttgcttgctgagctctcctgtacactgtatagtagcctgacgactgcatatatccagagtggttagtagccgaaccgacgagcaaatggtgtgtatttggttggtatatgttggtcaattttagccgaaccatgccatagattgggtttgtcaagtcaaatgaatcatatgcattattgcaaattgcaggggccgtccagtcggttgaagacaacgtgtacaacttggtacaacttcactggccgtgatcgacgggacgatgcacgaggaaggagtataagtatacattcttgtgttaaagaaatagagatcagcaattatacttgaatttaaatcattgctaaattgtctatagaaaatactctgttaactagaaggaaaccataattaacaatgcgttttataatcggaattgtcagggagaatttttttttaattctctttgctttaaatcattaacaggacattcagaggaatattcagagcagataaagtaataatgttaagttaaaatgccaggaattgaattaataattttttcctctccctcctttggtcgagaaccatccccggctcactctccccgttcgtggttcgtcgtaaacgccaacccctttgccgccgcttgccgcgctgctgtgcgccgcagcttgccacgctgctcctgtgcaccgccaccgcactgccaccgcgtcgcagccgcattgccggctgtgccgcaccaccgtcgctagccactaaccgttcgttcgcacgtagtatagatgtagtcccgttcattgagtagttcggagtcattatgagccgccagttccgttcgccggttcagttgaccgtttaagtagtcccgtgtcacggtaggttgactcgttgagtcgctaacccgtgagacttgtttaccagtgttatattttcattaatttaattcgcctttgggcattaatgtgtaataattgactaaggtttttcggttaatagtaattacacagctcatgttctaaaattcatatataattcatctgagctccattttaacccattcaagttgcagtgaattcgttaaaatttctagaatccattaaaattggtttcttttgctgttttggtagacttattgtatgaattgttgtatactttctttgttgtttagattccggtggttccgacgctcccgtttattttgaaatggtcgcgaagtttctgttagttcaagagaaggcaagtcatacatacagcattgatcatgttgagcctattttataaatctcctgctttctattaaattgcattattttagaatgtcatgtgggatggatgcctattgtactcagccttttgttaccttgtgccattgataacttgggatataaatgactagatgattagtttaggaatgctaagtcatgcttagattaattagtgaaagggtcaattaggcctagagggggggtgaatagcctaatttaaaactttatgtggaagctaaaactaagttagggtcggaaagtctgatccacagtcagactatccgaaaatatcagatagtctgatgttggatcagactgtctgatccactaaagagacacaacaagcagatctagcacacaaacaagagtatagcacaaaaagcgactagatctatagcggcacaattaagcaaagctaaagagaggatgaagagatatcaccaacgatgaagttcatggagttgttcccggagttcaaatccttgaggggattctactctccgttgaggagctccctaagagccgggtctttgctaaccctttcctcaagaggttgcactaagcactcctccttccactaaggggtatctctttccttgcggaggcgagatccggccttcacaaacttctcccggccaaccacacgtagatcggtggctcgggagtgacacctagccgtctaggagtcctcaacctcgaagagtaacaaacagcacacaactcttggtcaaaccctagtgctcaagattgagtgaaacatacactaggccctcaaacactaaatccacaaccactaatatcgaccacacaaagaatgaggagggatttgagagagggagaaagagctcaaagatccaaagcaccttagcaccaagctcaacccaaagtgaatgagaatgaatgagctgggtaaccctagaaaaggtttaggtggggggtatttatagatccccccaaaaagtgaccgttggaggagaatctttcagctcacgtcgtatagtccgatacaagatcggatagtttgatattttaaacctccaaggcaatgagaaacagagaacgaagttccatgaaatttcggactttccaagacatcggactatctgatgataaatcagagtatccgatattttagaagcaaaaacttcatcctcaaacagagactcaagttccatgaaatttcagagtctctgtatcatcggactatctgatccaacatcggatactccgacacatagaaaaactcactcgaaaggatttttcaaacaaagacagagagtgaagttctgtgaaaaattggatagtctgatacatcggataatctgatttcaaatcggatagtctgatgttgctcaagtaagaaagcaataactttttactccgaactccgatttcgaagatcttggactctatggaaagctagtttcgtgggctatcaaacccaacataaaacatggtccaaaaccttcaagagatgttgaaaaacttgcaaagaaacccggtgtaagtgttgtgacaagtgaaacaactcgggattgaaattttggcttaggtttttcaactcacacaaagatgaagcattttgagcactagtgttctaccaattatattcatgtggtattcctcttaatagtacggcattcctacgacacaatgcaaggtaaaagatacaatataccatttgatcattgccgcattgcatcgtgatgtcgcattcacgagatatgcatcacattacaacatgtcgaggacataacaaccttcacatttgcttgaataaaagtgttagtcctctctaatcgcattgtaatcaatcatcaaaatcattaggggcctagatgcacttttaattagttcacaatgggattcgctataaattagtccttaattatatgatgatgtaccgccatggttatggtttaattaaactaaaatatgctttaatggtgggttgtggttgcatggttttgcaagtcgtacccatgacaattaaagaccagttctcgggagtccctagaagataaacacatacttatcaaaggccagcatgggctccaggctgaatctagagtgtagcctaacctaatcaacataccatggcaagggtagaggagatggtgcaattcggacttggctctggtctctactgtttctggatttacctaggcacgagaggggactgtccactgcctttttaaggagtggaggtgaaacctacggtgggtatgcttggttagggagggttatgcgaaaggttctgtcacagtttctttctggtatgtcatggtagcatgtcggcgcacagtaacgtgttgtgaggctgtgtcttatgggtaaagttgtatacctcttatcagagtaaaactattcgaatagccgtgcccatggttattgagcggtcaaccagctcgccgtgattagtcttattcttaataatatgacataatgaactggtgtagttcaagtggtttggatgggcatgttgcaacgtggtttagtgttgggcagtgatattttaatattgcttaattatatctattgttttactgtgttcaaattatgatttacaaatgctgcttttatgcaaatatcctatagcctctcctctgtgaatatcttgcatcataccttcccgttggtatgacttgttgagtacgatggttggtactcagtattgctttatttatccccaccccagaagtagagaattattcagatgatgagttctacgaggattaagcttgttccagacgttgaggatgcctgtggattatggagaaagctatgctttggttgtgaagattaagtttagaagttttgttcatttccgctgcgtttgtaagaattatttattatttttgtaagacgtggatctatgtatcaatttgttgtttgtgtactctgtctggtcctggacagagattttaatacatattctgcttgaaattcgagtcgaatttctgggcataacatgccctctccactaccagtcacaaggcaaagatcagtctcttcatccttatagcaagatctagcaaagccatcaggatcccagcttcacgatgaatttttagttgaatcatttttttctagtttgattcacatgcgagtaattttatcactcgtatgtgattgagccggtatttttttcatttgtacaaccattttgtgatacagatttacaatattcttatattagtttttactcttttaatgtgtattaaacatatcaataaacatattactacacggtggctacgaaatcatgggctgcatcgagaggaaggtggtaattgttttacacaatatttataacactgataaaataattaatagtgttgtaagctggtagtaattcttttacggctatttaggaatggtgtcgtacgatgtagggatattctgtttgatgaaaacaaaacaacgaatacacagaaaatagggaaaccctatattttattaatcacgattcattaacatgaatgtttacaaatacatgagggctcccgcaggagttcgccttttgtcttcacgaggaatacttaatggaaagatatgatgactggagattgcgtgcagtccgctgattcctggcgcctagcaatgaggcggccggtcaattacatccataggacgagcctatggaatacctccgattaagctgcgcttgtgatcgtcgtcttcaaaattgattgctcgccgaaggttgaggttggtgtagagatttaattataactatgatataggtggctttgttttgccgaaacccggtcacaatatattatcaccacgtccatacatgaatcaggtatcataataaaggggatgacttttgcctcatcggtgcccagtcatatatgccggcctttattagatgtggatatatcgttacttttgccttgtcggaacctagtaacgtttatccgctcctatctgtttggacatgttaataatatcgtgacaccggcctcgtaaatactcggccataatttttatcttccaaagatcacgaatagctcccatgcgtgtgcatggtagcaaaatatattttgtaaaataccgcttagattgtccaatcaccaatgaaagttggacatatctagcgccgttgttatcggtatcatagtaacaaatagatgatccaatctccaatgagggtcggacatctagttttgagcatagaaaatatcaaatagtattcggataatccgatcgccaatgaggaccggaccacccttataccattgattgtataaatggagtttgatgataaccgtgtttcggctctcatcgatctggctttaatcatcaagatcaagatcgattaagaacacgcagatgttccgatcgccaataaagaccgaacatctattgtgtttaatctagaaaattaatatttattcaatgtgctcaccatccaacgcaaatatcctgaatggcggcatgttataaatgaatcgacttgacgaagaacgccggctgcggtgtttaattctctccgcagcggcgccggtttgctatcaccggccggcttcaatctcctctcctgattttcctaatctactaagaggaatgggatgaatgaaaatggtggttgggtgtctcctgtggcgtcgtccgcgtcccagctctagatgggttatgctccttatataggcagcggtgacggaaacggcctccgaatttccagcgccccgtgctaatcttcgtgataagccgacgcagagacgagccaatccgtcgacgtgtactgaagtctggagataattatgtgattaacatgtctaatgacagtgagccccatatgtttaatcgccacagccaatgaccatgcatgctcacgtagtaacgatagcactgcttatttcttttcttttaatagctccaatcttttgaattgtacgtcggatttaaaatccatttgaaccattactttctattcaaattatacaacaaaacgagcccaatattgaatatattcggacaccgtgatatttaatttttttgggcccacatgtcatatagacacgtctcgtatatatttaataaaattgggtggcagataatattttcgtacaaaattaaatgctcaataatttattatatcttatatgattttttttttgcacaaaaactcatcaaacacattcatgcgagtaaatttgtcactttagaatgagcagatatgggaggctggaagtaaatagaaaactcgttacttttgaaatgtggggagacactggaaaaacagaaaactcagaaagaaaaaaaaatagacgataaatattttattaaacgcgaaaacggaaaaactggagagaatgaatgaaaaatggaaaaatctggatggttaatattttaccatgctctttgatgaagatgagatggaaaagagaaaaaagaaatacgaaaagtgggtggtaaaaaacgaaaaaaaatggacggagaaaatgtgggatgcgtaggaaaggtagggtggtaaaaaagggaaaactagaaggagggagcgttgtgcggagctcgaactaatattccgtgcgcagtgcgcatattagcgccaccgttatatttcttagttgatttgtgatgcttagtttgaggggtttttatatttcaattaatattcgtcaccttattcgtttcgatttgtattcgtgtcgcgtctgtattcgattctgttttcatatccagaattccgattccgatttcaagaataaattataaaaataaatatgatagagctaatatttaaccatatccgatcctttttatcataatagcttatcaccactagatttatcagacgatattaatgctgagcattggatgggggttatcttgggtagtaaggtagtagggtgagtttgaggaggaggagattaagaagattgggaaggtacgaaaaatgaggtgagccattagcgcatgattaattgagtattaactattttaaatttgaaaaatagattaatatagatttttaaaacaactttcctataaaaattttttataaaaaatacaccgtttagtaatttgagaaaagtacgcgcgaaaatcgaaacaaaatcactctctttcttcagctgccgaacgcagccgtagtatcgtcgagtcgtggcatacaaatcctttgtagctggccctacaagcgagacaatcacgcacgttgccaaggcgtgtactttcttcgtacctcccaagcaaacaagatccagaaaagccgtttacgatccaactgaagcagagtattagctgacgcagtcacgcagacggcaggtgaggtccgtccaacgacgaagcgatcgaaaaccctagcgagcagtaacgcgaccgggaaaaacctgcctcataccgaaccaccgaccgcgtcgacaccgtagaccgtgcatcagccgtccatcaccaacaaccaacggctcagatcgccttcccaccacgcggccgccgagctggactcctcatccccagcttcgctttcctgtgcttttatatagtcggccacgcgtcccttgagcccccaaccaacctagctaaccgcgccgccgcgccgttctcctccccacccggccgccgcagaagcgcagaccatcaccggatctttccgcgcgaagacgagcacgccttgtgaatggtgggagcccgcacgacctcccccgcctccccgccgcagccggagagggcctccttccgcagcttcggttgctgcatgcagggctggcaccaccgctgcatcggcctcgacccgtgaacgcctcgtcgccggcgacgagcgcgcaacgggcgcaggatttcgtcgattcgattcgactcgactctcccgcctgattctttttttttttggtcgtgagttcttcctcttcttgcgagaaaacagagagaaaaaaagaaagttaggcaattctttgattttagttggatttgttccgatttggccgttgctctaccgccgacgatgatgaagctgggcaaggcggagtccgcccgcggaaaggtggcgccggccgggtccggcggccgagcgcgcatgctggtgacggtgaccgtgctcggcagcgccgggccgctgcggttcctgatcgacgagggggagacggtcgccggcctcatccgggctgcgctccgctgctacgcccgcgagggccgcatgcctctgctcggtgccgacgccgccggcttcctgctttacaccgccaacggcggatccgacggtacgccacccccgactccagatcggttcaatccgagcagtttattagtttgttctgtgttagaacctcgcttatctgtttctcgccgtggtgtgcagcgctcagcgccgacgagaagatctacttcaacggctgccggagcttcctgctctggcagaaggcggcgcgcgacaccatggccaagggcggccggcctgagctggcgaatgtcgcgacctgcaatccctgcaagaaacggggcggcggcggctggaagggcggcctgaacaagttcctcctcagcttcagcttcaaggtgtgagagccaccgatgcctccgtaatccggatcgagctgatctcctcctgccggaatcgttgtccccgagttcatcactacagctggtcgggttgcgcgtaataattcgacgatgcttctttttcagtcgtcagtgtcagttgcttggttatttcgttcagttttgtcaatctagtcgcattttctcgtcctgttgcaaactcctatctacatgtcagcatcaaaattatgaataaaatcaccgtgtcccgatgatatttttgcttgtgcttgtcgtttgcttaattcgttgtatattctagtgatttcctctctaataatgtgacagttgcttgtgaggtgttcagttcaccagagaatttagatgtcgagttcaatttttagtcggagccggggatgaagtagacgagttgatgttgtgttccagcgggtcgagcatcatcgcctcatcggtggcggtgacgcccggcgcgcgcgggattgcgacgtgatacacgatgaacgagcatcggcagctggatggatgctgtacgggcgctgtgtgaacatgatatgcacaccgctggcagcatccaggttccagtggacatacgtgcgtgatttctgatctgccctttgcttggccccaaaggtcttttggtgcttgggatccagacatgcagcacaggacaaaaggtacactccaaagtgcgtatcacaaagtgagaaatcatgctatttcgtcggcagttatcattttatttatcgagtagctagcttgcacgatactttcatgcttcgaatgtaacctagaatttatatattctatattcgcgtgaaattcttgatagtgtcgatatacaacattatgacattttactaatttgcctcatacattgatatatggattcagttgttaattataaagtaaaatgcatcagcggttcttaaatttgtcatgacgtttcacttatatacacgaacttataaagtgcgtatcgagtctcctaaacttggtttattgtatcatccctatctaaattctcgtttgaccgcggtcttacctacgtggcgtgtcgatgacatggtgtttttttttccttttcccccttttcttttttgtcctcttcttttatcttcttcctccgctagagccacttcaagctcccccatgccgaccaccgtcatcgccaagcgtcgttgctgtcggaggaagaggccgaagaagagagaaatgaaagaggaaggagggagaaaaaaaaaataataatgtgccatgtcgtcgtctacatggtatgccacgtaggcaagaccatggtcaaatagaactttagaccgggatgatataataaactgagtttagagatctcgatacacactttgcaagtttgtgaacctaaatgaaacctgcctacaagtttaaggaccgctagtacaatttactcttaattatataactgagatggtacccgtgttgctactggataaaggagttgtgacatgcactttttttaagttaagtagatgaatgtacaattgtggtgtatataactatatatatagagaaagagagtatcagttgtaacatatgtgtgagaaaaatatcaagacacataattagaggctagcatagcaagcttcggaaaatatgtaatggagaaaaatagtccaatttaacttgatagatcaaatttgatttatacttctcaaccgtaaagcctagtatatcgactcctctaactactaaaataatgtaaaatgactttcttagcagtactgacaatggattttgctgatgtgttgtccacgtaattaacagcccaatcataaaagaaatttaaaaaataggcatcaggccaaggtgtaatagactttcctctctccgcttgtctcatctttttcctccggaggcggtcccctctctctttctcttggcggatgcagaaagaaaccataggtcatagcttgagctgggctagcttgaacattagcgtgctgtcatgttaaggtgtgccagcttgccgtccttcacctccaccaccaggcatcgtctatcttctcctcgtccaaggcctcttttcctaggctcagcacttaccatgcgcggtgaggtgatgattgcgcttagatcctcgtgagcctgacggatacagatcgatgacgaggttgttggcttggatggggttggcgtcggctgctcaagcattagcgacacgcacgactcgacaaggggatggcgcctgaccgctccgcttcgccatgctccccaaaccgctcgtggtacatgctatagttccccttgtcggtgtccatgaacgcgaagttcccttgactcactggccaccttcgtgcagccacgctatccccaccatggcggcgagctcgaacaaggggaaggagggctgcaacaccctcgcacacgtcgtggtcaaggaaggggcctactcaccgtcgtgctggcgatgttgcgcgaaggagcatgacgttcatggctcctaccatcatctccagctcctcttttcgtcgtccggacgcccattcgtctcgctggtcgccacctcaaggctcttgaccacagtgagagattgggaagaggtaaagagagataagggagggaggagagagagggaagaatagaggaaaaagaaatgatcactaccatgtagatcccacatatagttttttaagggttaattcgattcatgccattgtaaatatgctatttcagataaatgtcattacaattcatctatttgtagctgtgctactaaaattttacaaaattaaaaccatgccgctgccatcatattttccatcttcttcatcatctgcacgagggacccacttgctagatttatcttcgtcatccccttcttcctttcacttctctcctctcacactgtatgtttggatccaatcccctcagcccaccggatccctacgcattcatccatccacccccagttgcatccatgagaagtagacaggctcggcaagcagatatttcccctactatttttgcctgaagagattggagaccatgttcatggcttccacgatcgaatccgtgggaagcgaccaatagaaatcacatatattttctttgcttggtcctagacttttgtttggttccttcctgcttggtttcttcctcaccgtcgttgacgcccaccacgcggagccgcctcatctcagtgagcgcggtggccaggggcggattcacaatgggggcggaggggtctcgagaccccactaccgcccccgggacagtggagacccccctaagcccccactaaattttttttccatagatctataggatgtggggactgaaggttcgatttatgctgatgtagtttattcagcccccactactattttttttctagatccgccactggcggtggcggtcatggcgacgatgaacagcaccagcccgacattggtgcgctatattggcatcaggccatgcaggctgccgaagaggcagcaagagatggggacaacagtgcagtcttgtgcacgccgagcgccccgatcttgcgcggcgccgcgtgcacaccgagcaccccgacgccggcgccaccgaagctcgcggcggccatggttggatggacaacgacagtgaagattgaacatgggaagagataaaggaagaatatggagcaggaagaagatggaagaaaaacgtgacggtagtaatacggttttaattttataaaattttaatggcatagctgtgaataaacgaattataatgatatttatctaaaatgatatatttaacatggcatggatcgaattaattaaccattttttaatgattgtagtgccacgtagatgcaagtcaatgcaacacgtggataccatatcacatatcagggaaaaccattgttaatattgtcgagggagtcattttacgctagttttaacaaccattatatcccgttttgtactttagggtacgaattagattgaacctacatgaaggagtagaaatagactttattttccttgtaagggaacatagggatgagatgggcttgcctgtagaaattggattaggtgggcttgttcgtaggaattgcgctgggctgttttggtggctgctaagtattgtcaattcaattttgctatatatttgtcgataatttttctttcaaaaatttgacatatgtaattacagtaaaatcatagtgtgattacactataacttgcatgtaacttgtatgtaactttcaaaaatctctccgtaacatgttgtttcggtaaaatggaggtcgtgggaacaaatcctttcacatatgtgtgtgctgtgattttttttcttccttactagaacaaatcttgtaatagatctaacgattcaaaattacatgaaacttgcatacaagttacactgtagttacatacaagttacagtataattaaatacaagttacagtgtaattacactacgattgtagtataattacatctgtcaattttataggaaaaaatttatcaataaatgtataggtagtccctggttaatttcaatcacaagtaagatcatataaccttatttctagcattaagattatgtgataatcaattaatgtggaatttgaaaccagcgcactcccataaactagccatgcgctcccattggttggttttggaagaccatgaaggaggtggtacgtgtttttccggcggtgttaggaaaaaaaacgaactaaaaggcgagtcttataagacatttagtgatctaggaccaaacccatttaagctagataacactattgtgttttgctccataatatatggatgaatatatttgggttagatgttatagaaatgatgaacggatttgggttaaaatattatgaatattacgatgtgagaagaaataatgatttgtcatactatgctaggtttaaaaatgcaataaattgtactccctccatcccattttaagtgcaaccataagtttccgtgcccaactttgatcgtccgtcttatttgaattttttttataattattatttttattgttatgagatgataaaatatgaatagtacttttcaattttttttcaaataagacgaacggtcaaagttgtgtacagaaaaaatatggttgcacatagaatgggataaagggagtaaatgatacggtattgatgaggacatcctccactattatccgctggcaaagacgccaaagtcgggcgacgaccgtgtgagcttttgaataatcccaccttgcttagcttgggaggaggaagccaccttaaaagggagagccacctttcccctattggactagtcttttagggagattgggcttttccctgagtgggtgtgcctatgaactgttggggtccaggcaaccttaagttattgggcctcggccaaccccacctgggccggattgttatcaggtatgctgtcatgttaagctttagagtatactaatgattgatatgcttgtatggtgagttttatgtgattagtgtcttggtgtagcatgtttacatgtcaaggtttagcttctattaataattgttgtgcttgtatgttgaattttattttcttagtggttataattacataaaagatatagatctagtccccctaataatccaaggaatattcacaaataagctcttatagtagcttaattactctctccgatcataaatattgatgtttttgacctagtagcctaattactctctccaatcagaaatatttgatatttaagacaaggatcaatcaaaaatttgaaactccgaaaatcaataatttctgaaatacttagcttaaaaaaaatgacacatgtacatttgccttaaaaattgctgtcataatatgataaactataaacttattcaaatataaaattaatagtcagaatttaaaaaaaaaaccaaattttgtcctagatgtcagccattatgaaaggagggagtatgttaattactgatgctaccataaaaactaatggctaacatatccatcgatcacactatagggtctaacattctcctctttttttttacggggaagagtctaacattctcgcacttgatcgaatgttaaagtagatagagtgagtatataatcatcactaaaccttattaattatctatagtgcactgctccatttcatatggattactaattaggggtacttgagagtttgtaagcatgcaaatactcctttcttatggtcctcaatacaattattttccatcaatcattgcgtgcacttcataagcagaaaaacaaactttgattttcaggatcaaagtttgacatcctattattatcgtaattaccctaagttataggttgtctataaatttcatgccggcaatattttttaaaagagattagaagggagtaagggtgtcagcaatatcatcaacctataacacttattcttatatgatgaatatgaattgtttcgttgtgtaatctatctcaatagattctattaataatctatcattattaatagaatggtaggtatcattaatacgagcgattttaataatgatacctaccattctattaatcctgggataaaattcttatgtggtatggcacctaatgacctcacaataggtcataaattcagcttgcacatactaacgccccctttgaaatgctggaaactcacacatgaatgaatgtgataaaaacatgaacatggattgggttgtgagaggcaaaggattggaaaggcctcttcgttattttcctccaaaaccaccatgggattatccgtttgataggaatttcaaagaaaaggatatgattgagtcatttgtttcagaggcttttaaaggtattttctgtgcatgactagaatcctcaaaatgtcctatatcaatcctccatttgaaaaggggaccaaaggatttgtttagtgctatttcataatggacattttgcaagcatgaaaatatagcatgatatgaatttattatttctcttacattatgcagttggtgctcgagtaacctaagacctcaaggttatttgtcactagggtttagctaatcaagaactacttcttttacccataggttgtatgtaagaagatatgggcatcacaagattaaattcaaagaaaattcgaaatagaaaaggaatttaggaatactctctatgatttttgaattatgagaattacttttgaatggaactaataggtgtggtccacccattagtgggaggaaccaccctggaccaaagtgatgggcctaggatcatggattttccaacggggtataccacatggcccacgtcaatgtctaggggtgacacggtagttgacacggcactgagttgagttgaggtggtgatgatgtataggatcaaacatcatatgactgggattggtattgtacgcagaggcaccgattagattaatcagacgcaaccgaccactaggattggcgctagctaggaagcaaaggcaccggttgatataggagaagaaaatggccaaggtggcactggtactaacatcagcatcgacctcttagcaatgttgagcgcacacatggtgggtggtccgggtgatgatacacaggcgaattttgaggaagtggaaaggcgaatacatctcgctaggcgtgaaaatgtagagaggcgcatgattaatatgggaggtgtgcaaccgaagaggaacaggggcggtgaaaattaatcactgaaatgataccaacttgtcacgcccggaaattcactaataatttccaaactaatttgtgcataaaatcctcgtccagaaatcagccgaggtacacaaactgacaatttaatatacaaatccatcataataataacgttgcatacttacaaaagaaaagaaaaacaacagcagcggaataacggtctagcgatggcttcagctccactcccacaggcaactcaactggggtataagccaaacgtcttctccttctggatcctttttcttcaactgaggttgattgattattgcaagaatgagcatatgacatactcaacaagccacacagcaaatatgcaagtgcacaaggataccaaaggatggcataatataggctcatttgcaaaagcagcatttagcaaacatttaagagtaataaaacagtagagtactttaatcattaattttaatcaacactgaacaacatgcccatgctgctcaggcccaaccattctgaacaaccatacccggctatacagatctaactctaaaccaggagctgatcaaattattaccaattatgacatccataattattgtgagaggtgtgagactaatcacgaaaaacattgctcaactcgcccataaccgcgggcacggctattcgaatagttttactctggccagaggtgtaccactgtacccataagacacagcctcaacatcatgtctaccatgcgtcacgatactggaaagtacccgaatagaggttgtgacaataccccctgcacaacacaactcaccacagtgcaccattcctggatcataatcaccccctctataaatataaccagaggcatggactccccagcaacccccacggacttctcgccgcttctcagtctggtgccccgcaatgaatcatgctatacaaaaggtaaagccgttgcccacgctggcttgtggttggcacggttaatgtttcacaacagtagctcgcgaaccggtccttaattgtcatgagcacgaccttcaaaaccatgtgctcacaacccaccattgtcaagttttagttatcaattaattatcataacacgattaaccatcgtgagctaccattaaatataaccataattaataatatagtataattcaccccattaatgatgccaatgtttctaagcatggctaagcaattttatatatatatatatatatatatatatatatagcatttagctgaaccaaaccaatatataaggttctagctaatcaaattataacccataggaaaataaagtcatcttcggccattaattaattgggaaaggctcaccacccgatgacattcgaaaataatgcataagttgaaataaaacattagctttaaacgggttcaacatgctcaaagggttgtttgggatctatgtgacttgccttataaatcctaagacgaaaatcaggacgtgacaaatctaccccccttacaaagaatctcgtcccgagattcggaacggctagaaagaaaaaggaaataggtaaactgcagtctatcttattccataactccgataattactctaaggctttaaaaaaaactactgctgctttgaaactggtggctgagctgtatcccttgaagacgcaaccggcactaattgagtagcttgctcgatgttaacttcagtgcttgtattagtctctgagttgatctcaccacttatgtccaattgttgtgactgttcttgacctgcagaagaagattcaccaatttggagtggcttgatacgctgcctctggctactatcctgtgcctcctggaaaacaatccttcctctcttacggttgtccatcctgttcttcttgtcttccagtcgaattgctttgtcaaccaactcctgaaaatcctcatagtcatgagagatcaacataactgacaactcatcctttaagccttccaaaaacttctcatgcctttcctcgtcagtacgcacatcttctggagcatagcgagctagacggttgaactcatgaagatattctgtcacgatacgatccttttgcttaagtgtcctgaactcacgcttcttcaaagcaacaactcctgcaaatatgtgtgtcttcttgaatgcttcagtgaactccgcccaagtgattgtcctaaattgctccattggtccaacttcctgatccactagcattgttgttgtttccactatagcttgcattttttttcgttgcagagttggaaaagttaggaggagaggggttacactaaagacaagaccttaaccaagttaccactgatctgatgtgtgtagttcattatattgtttaagttgattaagcaagcaacctagtataattacacgctcatcattgaactacaccaatgatgggaatgcaaccgtacctacacacaaaacaagcaacaacgttttaccctactaactattcttcaaagtcactttggtggtataggtgctaagataggttccaaacttcactctatcttgacagcggaacactttgattcgactatcatcttcttattcctcgatccactggacttgcagaagttgacaacatcgacgtcttcgagtttctccatcaagtttaacaactactcaatttgcaaagaattctaaagaaggaagaaaggaaaatttttcacaaatcatgttttcggaaaatttgtccttaaggtttgaccatttggcttatcctacagttgagatggctctgataccaacttgtcatgcccagaaattcactagtgatttccgaacttatttgtgcacaaaatcctcgtccaggaatcagccgaggtacacaaactgacaatttaatatacaaatccattataataataacgttacatacttacaaaagaaaagaacacagcagcggaataatggtctagcgatggcttcagctccactcccacaagcagctcaactagggtataagccaaacgtcttctccttctggatcctttttcttcaactgaggtttgatgattattgcaagaatgagcatatgacatactcaacaagccacacagcaaatatgcaagtgcacaaggataccaaaggatggcataatataggctcatttgcaaaagtagcatttagcaaatatttaagagaagtaaaacagtagagtaattaatcatcaattttaatcaacactgaacagcaccccaatgctgcacaggcccaaccatcctgaacaaccatacccggctgtacagttctaactccaaaccaggagctaaacaaattatttccagttattgcatcaataattatttgagaggtgtgagactaatcaagaaaaacattgctcaacccgcccataaccgcgggcacgactattcgaatagttttactttggccagaggtgtaccactgtacccacaagacacgattccacacatgttgccatgccccgaagtaccaccacgtcactgcaaaggggaaaatcgtgacaatacccttcgcacaacacaactcatcacagtgcaccattcctggatcataatcacccccctcaaaaaccagaggcatggactccccagcgacccccacggacttctcgccgcttctcagtctggcaccccataatgaatcatgctatacaaaaggtaaagccgttgcccacgctggcttgtggttggcacggttaatgtttcacaacagtagctcacgaaccggtccttaattgtcatgagcacgaccttcaaaactatgtgctcacaacccgccattgtcaagttttaattgtcaattaattatcatagcacgattaaccatcgtgagctaccattaagtataaccataaataataatgtagtatgattcatcccattagtgagctaatgtttctaagcatggcaaagcaattatatatatatagcatttagctgaaccaaaccaatatataaggttctagctaatcaaattataacccataggaaaataaattcatcttcggccattaattaattgggaaaggctcaccacccgatgacattcgaaaataatgcataagttaaaataaaacattagctttagacgggttcaacatgctcaaagggttgtttgggatctgtgtgacttgcctagagcttcctcaaacgcttctgaacctttctcaacgaaaacgctctcctccggaacgtcggaaacttaagcgaaagaacaaaatcaacaaaacagtataaaaacaagtataaacagtacatgtggatatttttaacatgtagatatcgattttagatgaatttagcaacttgaaccactcgaatccgagttacgatgatttagttatgaatttccgaagtttaatcgattttcatctaaaaaagaaaacctagaaaaagggaatatgacgtcatgatgacgtcatcaatggtggctacggctcggatggcacgaccgccggcgctagggaccttggccggccgattggagggcacctacgcgtagaggacgacgacgcgatctcaacgatactcaccaacgcgacgaacgacgacggatgacggccggcggcgagcttgtgcggcggcggcggttcggtcgacggcggcgacgggtctccggcgaccggcgacagcggggagagggcggccgaggttcctcacctccgtgcgcacctaacggcggcgaggggaagcggcggcgacgacggaatcgacggcgcggcgcggctgggcgtcggccggccacggcggcggcttgctcggcgtggcggcggcgctacggagcacgagagaactcgggagatggggcaaacgaaagagggcgactagggggtcctttttatagccttggattggagagatcggactccaaacgagaggatttgaaccggaaaaatctagagttcgttttggagagataaactcgaaaacgagtttgattcggataaaatacgaaacgattagctccgatttttgggggaaaagatagaggaggataagaggaatatttcccctgaactaattttgcaaacggagcacgggatgcggtggatttggtggaggaagcggcggctgcacaggtacaggacggcagctcgggcttctgtccaagcttgaagatgaacagtacggggaggcaaattagactttcggctgggcttctacttccaaggactgattaaagaagggacaaaaagcagacttcgggaaagagagggaaaggaatgcaagctgagaggagactgggccgagagtgagaggacttttcctaattcggcccgaaaaggaaaaggtgaattttaattacttttccaattaaattaatcactgaaatgatctttgaattgttaaaaatacttgtattgctcaaataatttcaagaaaaatcttgaaaatacttggaccctcaaagtatttaacaaaattataatcagaccatttaatgattaatttaatatgtggataattactgaaatgttctttgtatgattaaaattaggagttgagctccgaaaaatccgagaaaattccagagagtatacttaaccatggagaatttaataaaaattaaatccatccatgctttatatttaggaaattttatttcccatatttaacttcacttgtaaattaatgaacatttaatataaattctaataataatttattaaataatttataaatcctaagacgaaaatcaggacgtgacagtgtgcaaccgaagaggaacaggggcggtgaaaattttttaggagaaacaacgtcgacaaatttttggcattgaatatggaaattgatgaagaagatgacggattacactgggaattgaaagaggtggtgtgaagcttgtcttgaagatgagatggaaacatgacatggtgtagacagcttcactggggatgacacaaggacgtgtgacgttagcataccgtaccttgggcctagccagctcaagtatgatgcgcaaggtagggatgggcgagaagagcaaattatacggtggtccgggtgcgtcgtctaaatccttgaactctcaaaatacatttttggacctctgaaaaacttgtcttagagtgttatacgtgtccaaacagcctccaacccactccatgcggggacgtggcatgccacagtgctgcctacgtgtgagtgtgacccacatgtcagccacatagaaaaaaaaatgaaatttgaaaacatcttttctcttgggtgtacaggagaaaacataaaatgaaaggatatatatacatttttaaaagataaggtgtagaggataaatgtaaagaggattttatttttcttttaacttttagggtagagcaaaaaatgttttttaacttaattattttatatgtgattaacatatgagtcctactaacacgtaggtgccaccgtggcatgccatgacagtgtacggagtgggttggatcctgttttggaccggtataatacccaaaacaagttcaaagacctgaaaaatgtattttgagcgtttaaggcctagatgacacaccgtacaagtttgagatcgtccttgtacttcactggtacgaggatgggttccaatttcatataacataaaatcaaatagggttaactggatccatgctattataaaatcacatgttttgaaaccattacaattcatctaattggaataatgacattataaatctatggcaataggagatattccactacttaccccattagtgttgttaccaaattgccccgtcttctctcttccctcaatctcttccatgtctttctctcctccagatctaagccaaaactaccgccatagagcgacgggggacgatcgggcacaatcaagctcgattgtgaccgtgtgagctagcggattcaccggtgcgcgagcgagggcgaaggatccgcagctaagttggtcaccggtggcaaggcacgagcaaaacagatccgtgcccgagttggacgctgtcttgcgcacgtataactctggcgcccgcacactctctccgccctcctccttctccacccagcatggcaacaacgtgcagcgtgtaggcgtgctcagctaatatggcaacgaggacatgcacgaatgcctaaagcttcttgatttctccaaaccttccatttatgccacgtcgcccaaatccaaaccgtgaatttcttcttcatgttgatttctttcgccatgagtccacttctcatgagctttctttttatttccacactgttcgaagcagaagccaagttttcgcaaaaaaaaaaaagttgcacttttcttctgttccacttttctcctttgctctcttttttttcttaattctcgcagcttatcacagcttcatacgcttattttcccatctcagtttcattagctaagatcggctctttctcttccttgccattttgtttccactccaatagcttcagcacacgctctgacttgccttccgacaatgcagctcaagcatgggggcacttaagatccatggttggggtggctgaagtgaccaaggctcatgtatcattacttgttggctctgtctattatagtggagcaagacatgaagaagaattatcggcacaaaagagaagatgtgagaagaactgtgcaaattggctccatggaggtagaaatcgtttattaagaatttctgaatttgcttcggcataatcggtgtgcattagcaatttaatattttatatgttaattaaaccaagtgtcattagcggcctaattatcggcttaattaccctgggcctatacgggttgaataggcccaacaaaggatggctgcaagcatatatatatatatatatagtcatgttacagcctgaagggagattggggggttgattttgttatcgtcgaaggctgctgctgccgagaccaaggagatggcgatcccatcttccactatctgatgaatgccacctgttgttagggttggaagctaagcaaggtcaggtgatcgtttctggttttgctgctggattctcaagtgaatcctattcttactgtttgtgctgaaagtgctcgggtaggagaattcatctagggttcgtttctgctattgtaaaccgaatccatctatattgtgatactatttgtttgctcctgagatatttaccggtctactatattttgggtgaattgctttattgattcaatcaattggctacggcgcatgcacacatatatacagtcttatttgcagctattatatatatttggtcgattgagacaaacaactagattctacatattttgtaccgtgaaagagaggggaaattagggtactcgctgtcgggtgctcatcaagtggtatcagagcgtggttgatcatggtacactggaatttttgtttgccaagaaattatcactgtattaaatggtgaagatgacagactacagcttcacgaaggagcttaggtttgtaccaatgctatgcacaagaacttctccgtcgaactactatgtatgggaagatgctatggaggaattcttacgaggccgtggattggcttcattcatcaagataccttttgcaaagcgcaccttttctgatcgggttttgcgatggtggctgaaacaacagaatgcatatattgacagaggtgataaacattgcaggtcatggactgcaatgaaattggagctacgacatcgatatgattcacaagcttgtatgtttgtttccacaaaagaaataaccaaatttcctgagatgacatctgatcctgatgggaagttagatgggaagaaagagaagttatatcccgagcaaaaggaagccattgtttctgaaatttcacttcctcaaatattgaaaaaagaagaaactcatattgccgtggaagtggatgatggttcatcgaacatggaattgtctatgatagcacaagaagtacaacgcgacaactccaaggttgatgtgaagggacaacgttgtaatattttccagtccgagtgcaagattcaagacaagatatgcaaattaataattgatggtggtagtactactaatgctatcagttcagatttagtgcatgctttatctttgcctatgagaaggcttcctaagccgtgttatattcaatggatgaatcaagcaggcacattaaaaattactcacaaagtgagggttgcattttctattgggagctatgttgataaagtggattgtgatgttgtgcctatgactgtttgtcacatgttgttggggaggccatggcaattcgatcgcaatgctacccacgagggtaggtccaatcaatattcttttatgcatcttggttttaaccatgtggtgaaaccgatgcacaacagtgctattaaagcggaagtatttcctgtctttaggaagaagaagaaagatccaattgtgcatagtacaaagccaaggacggctttgattcaagggagggaggatgatgtgaccaaggctcatgtattattccttgttggctctgtgtctaatatagtggagcaagacatgaagaagaattatcggcacaaaagagaagatgtgagaagaactgtgcaaattggctccatggaggtagaaatcgtttattaaaaatttctgaatttgcttcggcataatcagtgtgcattagcaatttaatattttatatgttaattaaaccaagtgtcattagcggcctaattatcggcttaattaccctgggcctatacgggttgaataggcccaacaaaggatggctgcaagcatatatatatatatatatatatatatatatatatatatatatatatatatatatatatagtcacgttacagcctgaagggagattggggggttgattttgttatcgtcgaaggctgctgctgacgagaccaaggagatggcgatcccatcttccactatctgatgaatgccacctgttgttagggttggaagctaagcaaggtcaggtgatcgtttctggttttgctgctggattctcaagtgaatcctattcttactgtttgtgctgaaagttctcgggtaggagaattcatctagggttcgtttctgctattgtaaaccgaatccatctatattgtgatactatttgtttgctcctgagatatttaccggtctactatattttgggtgaattgctttgttgattcaatcaattggctgcggcgcatgcacacatatatgcagccttatttggagctattatatatatttggtcgattgagacaaacaaatagatactacatattttgtaccgtgaaagagaggggaaattagggtactcgctgtcgggtgctcatcagtggcacaggctgctagtgctaccacttccgttgacgggctcccgccgccgagttggtcaagagagagagagagaggaggggagtaaggtgataggggcaatttggtccaaaagggaattttaatgtattgaaagggtaaataggatgggagagagagagagagaggaggggagtaaagtgataagttgggatgaaaacggtacaaaatattttcagattccaggcttattttcgaaaacggaatcagccagtcagaaatacaatagtccataatacctccctagcctagcccaattcagcataatacctcccgtagtccataatacctcccctaacctagaggcttagagagtagagagtgaaggactgagagggagagtgaaggactgagagggacatcgaagattccagagctgagcggcggagcgacgcatccagatctcacgtcgcctcgtccccctccgtctgtttgaagtttttgtccatcgaagtttgaagctcagtttgagggtttcttgtattccgataaattttcgttatcgtatccgtgccggttcgttttcactccgttttcggtttcgataatattcaattccgttttcatatccggtgtttccgattctaattctgaaaaaaatatgaaaacgaaaacgataaaggtagtttccgttcgttttcataccgttttcatccctagtgataagggacaatttggtccaaaagagaatgacaatataccgaaagggtaagtagttacatatttccgatttcaaacaaatttataacgacatccttttaattagatggattgtaatggtattttttcaaaaccgttaatttatagagatatggattcaattaacccaatcaaataactctaattaacaaatgctaacataaataataattgtgttaattagccaaattaaacctttacaatttatgaaagtttctatcaagttattttaggcaaataaaaatgaatatgaaaatttaaactcttaaaaaaggtcctgaaaagtagatttaatcttttcaagcagagaaccgaattagagtagaaatcaaaattgaagtagggaaagaaacgaattggaaggaaaactcgtggaatcggaaaagcaggcggccactgtttataatatcctttcccttcctgcaagcaacttcgtccccgttaatcccagagggccgaccctcccgatttgtccccaaacccgagcacgccaccgagccctaaccctagcctccgcgatgtcgaccgccgccaccgccccgccgcccgccgcggtcctcccggcggctcccccgccgtcctaccccgccacctccgcgccctccgcctccgcggccgccgccgaggacgacgacgacctctacggccgcctcaagtcgctccagcgccacatggagttcgtcgagatacaggaggagtacgtcaaggacgagcagaagaacctgaagcgcgagctgctgcgcgcgcaggaggaggtgaagcggatccagtccgttcccctcgtgatcggccagttcatggagatggtcgacggcaacaacggaatcgtcggatccaccaccgggagcaactattatgtgcggatcctgagcaccatcaaccgcgagctgctcaagccctcggcgtccgtggcgctgcaccgccactcgaatgcgctcgtcgacgtgctgccgcccgaggcggactccagcatctctctgctcggatcatcggagaagcccaacgtcacttatacggtcagttttctgctggattttttctgatccgcgtgaaccttatgttgatttatctgttctagatctgcctgtaaagtgccatgtttctagttaatttaatttttcgaagtataattttgcatccgggagatttactttcacacgagattctttctgaagcccgccgggatcagtttcccaacattttgccagttaggcagaaagttggaattttagatattttctgatagttgagtgcaatggggatctgaattttgctctaccagtatacagtttattgcataacatgaagccttggaatcgtaataaggacatggttgggcttttgtctgtatatgaacatttcgacaattggattaaacatctatctgcctaagctatcgctgtttaactattgattggctatcgaagttaaccaatattgacttatgaccactaactgtgcataatgtgatacaatcctcacatatcctggagcttatttattattgctcactgtaatctattcatacagtcgacaaataaaatatttaacatttttttgcttctgactattttcaggatattggaggatgtgacatccaaaaacaagaaattcgggaggctgttgaattaccgctgacacatcatgagctgtacaagcagattggtattgatcctccaagaggtgtgcttctgtatggtccacctggaactggcaaaactatgctcgccaaagctgtggcacaccacactactgctgcatttatcagagttgttggttcagagtttgtgcagaagtacctgggtgaggtatgttaggaccagtttatgtatatatattaataacttagctcactcgttacatcttgttcgctgaaataacaaatctagccttatacttaaaaggttcaactgcataatgtttgaactgctgtgctactgaatactaagaaggaatgtgttaaggattagttctgctcaaatgttaaggataagttaatcgaaataggctaatcatttttagctgaagaattatggggaactttgatagtgctagtaaatatctagcttgcccatgctgtgtattcatttgaacaattcctattttttgtctgaatattctttggaaacaatctttttgaccatcaatgacaactccaaattaaccaagtctttgtgcttcatgctcaataatagtatgcataagtttgctttatgttttggatgttgagacttcgtttgtagattttctatggtttttgggcatactagttcttttcttgatgaagttcttttattcatttgtttagggacctaggatggttcgagatgtattccgtttggctaaagagaatgccccagctatcatattcatcgatgaggttgatgctatagcaactgctcgttttgatgctcagactggtgctgaccgagaagttcagcgtattcttatggaactactcaatcaggtaaggtttattgttgtaggatatctgtaagatacttgtggagaaactgaatatttgttgcttgttaaatttgaatagctcagccatacccatacatttaagtagttgaagctcaagtgacttgaaatacatagtcaaacaagggatttacacagatattgtcgagaatattttatgaaattcctatgcttgaaggttgaagtatttctcaccatgtgtttttttaaaatgtcgaatgcagatggatggatttgatcaaacagtgaatgtgaaggttataatggcgaccaacagggcggataccctagaccctgctctgttacgtccaggtagattggacaggaaaatcgagttccctcttccagatcgtcggcagaagaggcttgttttccaagtaagttttgtttttttttccccaaaatgtgtgtccttcgcaggatattactgactgatgggtattgtttggtagagctttatattgaaggttaagtttctatattgttgatgggtattgtttctttcttgttctttacatgtagccactgttaggagtctatattggttcgtgacttttttttagttatgcttgtttaacatagtttgatcggaggggcagaatctttctgttgcacagccaattatttgtgttgcatttgttggggataaatcaacagtagcatctgataatactaacaataaagtagtgagttggtctgtactgcatctgttgatgctcatttttccacaagagtgcacaattattgtaggctcaatatcttgctccctccatctgcttttgatagtcatatttccaaatctgaaaaatttatttttgataggcatatttcaatccaacaacctatcctcttaatgactttctcggatttaatgcgtgactctccattctttctttgatagtcatatttccaaatctgaaaaatttatttttgataggcatatttcaatccaacaatctatcctcttaatgactttctcggatttaatgcgtgactctccattctttcacacaagattggctacatgggcatcgagaaatgcaaatattaatgatttgcttgtttatgaggaataacaagtagcatgtttaaatggatgataagtagaattacttatccttggtctgtgtgccaagatgaaatatgactatcaaaagaagatggagggagtatatgacttggtttgcctgtaatttgcataataagtttacattatatccttctgaacatttgttatttattatttatattcttgtttgtaattcatctgtttatgatttttataactgatgaaattattggttgctagatcctttctgagattatattcttatttggtaattgatctctctatttccaggtctgtactgctaaaatgaacttgagtgatgaggttgatttggaagattatgtttccagaccagataaaattagtgctgctgatgtgagtatcattccattttgatcttcatattacatctatcataacataataatatatcaatctgcatttgtaccactagagcataactagaggattgccggttgatctgttgcttaacatggccattttttgactaatgcatagcccatgtctgaggactgtagtgcagaagatacttttgatgccattgtaacttgtggcacatctgtgctggttaaaattttaatgccgtgctccctgctcctaatccataacagtaaaattgaaatatcactgtataaaactagaggatattttgacataaatattgcatactccctgctaatgtaatttcgttatcaacagttatggcatcagagtttcagcttgttactgtgctttatttttatcttgctgtaacttccaattttaagttaataacatcaaaatctaagatatatgtttcccctcgagaaccttccaaatcttagggttctattttattcattacatgactgtagtttaccacacctttttttttattttcattatgtgaaagtaccacctctaatagattacctttatatgttctaataatttttgtaaccctagaggttccttaaagccttgttcatcatcaaacttttcttttcatttgtaattctgtgctttggcataaatgttgctggcagctacacatgcacatttactctctgctcagcttttgctcaataaatactgtaagcatttatattcgctttcccttgtgctgttctgaaattcattgtgatgttctgtttttcagattgctgctatctgtcaagaagctggtatgcatgctgtgcgcaaaaatcggtatgttatcctccccaaggacttcgagaagggttaccgaaccaatgtcaagaagcctgagactgactttgacttctacaaatgaggcaacatattgttgaactgcatgcttgttcccctccggagctatcattaacattaaagatgatttcctggatagtcgcctcagcgatatttagtttatgtacctagaggctcgtcagtgccccaatctgttttatcaggtctgtaatttcaatttgtgcttgtacttgctggaaaatagaaaggtttgcacggtcaatccttttgatgtgaaactggacgtattttcgctactattcctttgtgttggcggcaatgctttttggattgtcgtttgttggttaaatgatgtgcggctaccggctaggctagttcgtgagttaccgttaccattggctttacattgttttgggctgttgcccttgtggatagtgcgggggccgatgcacttcttgagtaattgttaagtcgggaaaaggaaaaagtacacccaaagtcccttaacttgtcattgagttacaaaatcgtcctgtaaccacaaaatcacatatccagcgtcccttaatttacaaaatcagtgcaaactaggtccctcagcggttttgacttcggttttatccgatgtggcagctaactcagcatgggacccatgtgtcagcctcttcatcccctcccctctccacctctcttcctctctcctctcttcttctcgggcgtcggcgggggagcaactagcgggcgcagaccgcagggggaggagccgcgcgtaggcgagtggcgcgcgggaacctcttgccatataccttagcacgcgaacgacgactacgacgacgaccttctcttgggctgattgcgagcaccacttcgtcgatgtcttctccttccccaccatcggcgtcgagctcgcgctggaggagagcgtcctcatcggagacatggctaccgccgcaaggattatggccgcgaggcagctgctgccaccgcctccgcaatcggtgttgtcacccgtgcagctgctctcccaccgcgtgcgcccgcccacgcgccgctccactgcccgcgcatggctagaagaggaggagaaggaagaacaggcatgcgccgcctgctggttgcctcccgtgcagctcagagaggtggcccgcccgcccgcgcgcggctccttcccctgccacttgcgcccgtgcagctactccccaaccggcgcccgtgaagaagagaggagagaggtggagaggggaggggaagaagaggctgatgcatggggtccatgtgggtcccacactgagttagctgccatatcggataaaaccggagtcaaaacggccgagggatctagtttcggttttgtaagttagaggacgccagatatctggttttgtggttggaggacaattttgtaactcggtgacaagttgagggaccttcggtgtactttttcgtcgggaaaatacgtgggctacctttgttgttcggcccggggaggaattcgcatcaaatggctaaagcaggtatatgctcggttcacctatcaagagcactactctctccgggctgataatacttgtcgttttggataagggtgaagtcaaactttacaatctttgattatgattcatttttttttaaaaaaatatttgtctttcaaatatggtgactacatgtatatattagtcttaaaaagtactttaatatgatcatatatttgttaacaattttatacatattataatgaaaaataatggtcaaagttgttttttggagaccgtgcccttatctaaaacgacaagtattatcaacccggagggagtacaaagtttgggtaccttaggctttactttgagcagcttgagagtcttaaggtgttttaagattatgagaatttgctagtagctggtacacagttcataaagtcataagaatatggagaaactgtttttttagcaaatggcttctaatttattttttatattctacaaatatagatttttagaatctagaatctatacttcctccgtcgcataaaaactaacatagtgtattggatatgatattctagtactattaatctggacatacctctatccagattcgttgtactatagtatgtcctatccaatctaacatgttttgggaggtgtagattatgagagatgctgcagttgctacaaagctctcaaacagttcccaagaatcagctagtcttcctctgtcctagtttatagggcgtgtaactattttttgctaagaccaagataaaaatgtttgttggtgttatgaagctctggtactaaagctccgtaggtttctgttacttttgctagtagaaattgacgcgtgctaggctactttgtaagaagctctttatattaactagaacctggggcgcgccgttggcgcgccgcctgggcggaaagatggtgaaaaagaagtggataattaggagatacaacttcatacgccgggtgcaacgacttcattcaaccagctaataaactgatggtgacaatgtaacttgcaattgttagagagtaccgggccgcaactttatttaagtttcttgtaaccggttgcttgagcacgattacaatagtgagatcatatgccacagctccatagtttgtgtacagataatacatcatgaagcagaattggaaaaggaaagatctatttacagagatgcctatctcttctagaagggggaaaaaccttaattcctttcatgtgaagatgcttaacaatgcgctatttccttcatctgtacaacaaaagaaaagcaagcattaatctacgcaggagaaaacacatcagcgccatatatatatatatatatatatataaaccatgagaccgtaagaaaccatcgagggagcaaccatgtaaacaacaacgacgtgaaacctaaactaattaaatgaaacacaacatatccaactaagtgtaatccgcaaactaaataacaaaataatttaagaaatgaacatggcacccacaaaactgtcacagtgcatctcctcaagaagcaaggtccaataaatgatgattgcctgtaacgctccagcaaatcatccttaccctagctaaaaaaaaacaattcggtcgtaagaacaacaataaatcctagagatggaatttataaactgcagcctcagttcaacaagcaccggagaacaccaccaagaaagaaaaataatatgtggtgtgctggaagatcaaatcgaagcatagaattcacagcttggaaagcaaacatctaaatttcagacggcaaaacaaaaacagatacatctaaactttgtcatcaattttctacccaaggcacttgtgatttaggtacttgagtattaaatttccgcccccttggttacgcagccacaaaacctttccacaaggatgctaagcaaacgaagaatagatatacaaagaatgatatataccaattgggcacaaaagaactaatgcacagaaagttcaacagcctcactcgcgacgattacaatgacgcgatgggagatgtgtttcaactttgatgtaaaatactcggaaaacattaatgcaaaataaaatgcctgaacatgtcaactttaagaagggaaaaattgacctaaagaagggagatgatgttagatcatactatcagagggtagtattgcttgccccattattattcgttggttatatgtaacacctgatgcccaggaaatagcacaagcatattgaaatcatcaaagaataaaaacaaattatatgcaggaggcgtgccactggggctaattacatattgtactttctaatgcctaattacatgtatgttttcatcgcttcaagcatgaatttgtcacggttatccataggacaaaacatgacaaaacatagatgaaacaatggataggtaatttttaaaagaatcaccagagatctatatataaatgccaccagataaatgaaagcaatgtataaggatgcagaattgagtattgaacaagcgaatagaaaaacataccaaacagtagaatgttagtgtcggtgatatgggcccgagggtaccgagatcagagggagaaaggctgccctcagtatccacgtggcacacccccccacggggggggggggggggagggggggagggggagcccgaccactccacgcggccaccacgcatatggggttaggtgggcgcccctcagtgcccacctaactgctttcaatgtgactgcaacggacgcaccacgcaatgcggcgtgctgagcgtttgaccagactgtgcctggccgattgacggatgggacggtggcaagccccgactccctctctagcacactcccatccaaatcttcaattctcacccgctgcccccggccaaactaacaaaggggggcctcacagtcccccgctcgaggggttaaccctccgacagttaggattggataatctagaatagtttattgaacgcattgaactacatctcttaatatgctctaagtgaagtaattaaaatctggagacctccctaagaaagtaggaagaattgacacaagacctactattatccatttgtggtcaagaaaccaggaaagcatatggtagtcatatatccaacattttgaaaggagatgtgttagaaatgcaaattatcgaaagtattaattcttgaagtgatgaaaatgaataaaagatagtaccgcattcatctttttacgtcttccttagttcctattgatttaactgagaaacgctgaaacatcaggaacaatatgagcaagaacaatatgttgtctaatgctactatatctgtaagcttttgtgtacatcattgattcattttcctaatgacctgcaatagtaacggtgaagaaaatgattatagagattttgtggggtcaattagatgggatgaaggaaggggatattagatatagggatgtaccatgatcaatggcactactggaactcgccttcgatttagcacaacactaatgaggtaaattagaacatgaacaaccagacaactaccctacccctgcatcagaaatatgaagttgcatcgatgagtttttatctcagccgtcataagcagtgaagaaaatcaagaaaaacttgtaattgtaccaacaagtgagatggacagatggttgcacctcattaaaaataataaggcccaaacctcctctccccacctgatgctggcctcctcccttgttccccatcacatagctccagctgctgctgccatctctcctgcgcgacatgttcagaaatctggccaccctcactgtatgcaaaattgaagctcatcagaaaagactgcaacaaagaacaaccaagcaactcctctgagcatagccttgccacctcttaattatcattgcatagtgatgtaaacacattcatgaaacaaaaaaattatccacaggcagagaaacacgcaacctttgatcacgtgaacacgagaaaggatcagtcattctgtgcaactccattatcctcatatacataatagaatccgcacaaaattggaatcatgctgcatcagtaaagattcggggatgagaggagatttcttcccgtaactcaccgagatggccactgagaagagtcatgagggtggggcttggacgccgccagccacctgactcacgactgctacgagcagcggaagcagcagggcgaggaatcgccaccaaggttgagcgcccattgtcgccgattgaattggtaatttttttttctctcttgtgaaagggatgaacaccgcggcaaagacaaggtgaaggaggatctgagacccttcgcgtttctgttgcggtcgattcgtcccctcgttgtcgttgacaacagcaagttactcgaggagagctcgatcctgtgtctgctagatcaaccacaaacaaaagccagtactgcttgagatcacaacacacaatcgtcacagctgcacaaaagacaaagattggcatagattaccttggcccttggggcgacacgggccatgagagcggcggcggcattgacgacattgttctcaatgaaactgattgtggagttgatgatgagtagtgtgatgatgcccacgaagtcctgccagttcggcggcttcccctgaaaaccccaaacaaatcaaccctcatcaattcaatcaaacctctcacaatccctcacatgccatgctctgaaacatcattaaattcattactacttactcctccattggcgagagcgatggccatgattgtcacagcctccatgacctaggacagcgggttccacatgaaccccaagaacttgaagaacttgctttcctgcacacacacacacacaaacaaacaaacatgaaaaaaaaactttgcatcattgaatcgattcctaaacagaacaagaaacttttctctactggatcttgggagagaaactgcggattgggtgggttaccttcttctccacgagcttgttggggccgaagaggttggcaggtaattagcattaaagatgaatccatcctaagcacagtgaaaatgcaatcattccaccatttgttattacctgtcaaatatactacaaagagaattcaggtcccaacagagatataagacaaatttctacagctaatgcaaagattggcaaagtgcagcagaatagcacgctgctagattcaaggaactaagaaataacacgctttgtaagtagaaaactatctattctaagatacttttgtaggtctttctccaaagtaatgataatacacagaaataaatgatgttataattctgaaatgcaggctaaaacattttaggaaggaaagcaaagcatctttaaaattctaagtatcatgctatctttagaaaaggacaatatggcattccggcaggctggaccatatgatgtgctaaagcacataataatccattctcatctcagaatatatttaaattgttggatgtattaactatgaacaatgttattcttatctgcatagacatggttttcatattgtgcaagggaagaactaacagtggtggatcattagttaccagtgttgcaagatgttcatcaaccagatccaaatgatataaaaggaaattgacttataaagttgacctaccagctagacgagtacaggatagaccaccagaaatgcaaaacatacactacaatcaaaatgctcttacactactcatgaaatagtttataccaactccaagtgtgatcatatccactccattgagtttttcaacaggcaaagccaaatattcacatgcaaaggatcaatggtgaaatttataggctgcaaggacatgggaattacagagagaaggtgaattgggatactaaacatttcatatccaactaaaatggaaagcttgagacgaaccaacatggccagtcagttgcgacaaataaaagggggcagtagcattaggatggaagtcaacatgtacttctggagttgcaaatatctcaaaagtgcacaataactattagttccctggcacaaaatgcaaagcaagcaaaaaaaatgatgccataccattttgtcaatggcaatgcgaaatgttccaggaatagagcatagtcatatcagcgcacaataactattagtcccctggcacaaaaatgcaaataccaattagttcaggttaacactgatagttccttgccaccaaaactgcaggttaacacttaactatggcattcataaagtcgtatcagtatgaccaaataaccaagcataccaagtagcaaagaacagttgttgtggtccgtccatgtctagctttgcaatgaacatgtgtcaacttaccatacgaagtgtttccttccgagattaaaacaacagaaataaatccatgatataaacctagttaaaaattacacggcacaataagatagatcttacgaaatgaatgagcttcattttttgtctacctccccatggaaatcaatatcatgatatgttcctagaggacaaatgttgaagtgcaagcacatcagaaaaggcagtaagcaaaaggcctttaaatctttcttatgcactacatggcagcatattcagggaagcttcaagagtttcaaacaaacaaaaccaatcaaaatattgcacaaaatagctgctataggtgatgggacaaataaacataaaagcctctcttactaaaaaaaacaaacaaaatgtgtcaaatcatagattttggactctgctcatgcaatgaacaattcaatcaaaaataaattggaacatacatggtgattctgtcgtaccataggatatacattttgagaagattcgtgaatgagacaactgtctggcaaaggttctcaaatgatggtgcatgaagataacccctagttggtaacaccaggttttcaattccatgagcctaaaatcaataaaaaaaaatcagttatctgacccaaaactgctagctatttgaacattctctcatgagcagtaggaacaaacagagatatgcaaagttagggaaatagcatgaaaatagcacatcagttgtaaattacataaaaataacgccaagctaattaggcaacaagcaaatagagcaccaaatatacagttacatgtaaaataagcagaaggcatttcatgaacactataatacctaaccagcatttttctgagctaaaacaatggttgccataacctgtcatttgggttgaccacgactactttacatagcactaaccttgcactatcaggtaagaacaatctacctaacaaacaatttgctgacccatcagcgaaataatggcactttgagtatttttctcaaaccactgatcttatggatgccaaacaatgacaccttcagtaattgctctgttcacattgcactattgcataactgagaccattggaacttgattacgtcagatgcacaatgtgttttacgacaaggccatgcacccccttgttttttattttaagataatgtaggctttattgatctcagatgcacctccttgatatcagagcaataaacaaatgatatgtaggagccaaacatgcaggaaggaattaataaacaaaagctgcaaaacttggttgacagaacacatattattcagcacaagcattggtcgaatagtggaattatttggctgtctgactacctcatataggcacctggcaaaccagcctttcataagattcgctcagtgtcacgacatcatagactccaagcttcttcaaccacataatattgctggggcatggatgagcagagagcagaacatgctgatgaaccaaaagaaaagcgcacaattagagcagagcaaactgaaactctcaacgaatcgtgaaatcgaaacatcaacgttgcagggaaaatggtcccagccatccacacacaggtccaaaatctccaaaacactaaacgagacgaaactggaacaaatccacacacgacaaaagctatatgaagaaattctctccattatgcagtaggaagacctaaccctaaactgttggagcgcaaactgccatgattcctagcaactcctggaagaagatgcattataggatgaaggcgtcgccggcacgagatgaatgtggaagccacagcgataaaagagggaaaaaagctcaaaaaagtaactgaaatcaaaagaggggagaaaaaaattttcccaccatgtcgacctgatcccaccagtagaagtgcggtttgaagcagctcttgacgacgttgttggcccgatctttcggtgagttgtgataactacgatttgggagaaacgttgacgatccgactacaaccgtacgagacgttgtgttgcgccttagcgatcgatacacctctccgtgggttgttgatcttgccggagcaaatcaaccttattcctgcaagcaaatcgatcaaacaagcaagaacaagataaaagcaatctaaattgcaaataggagttaaatacgaatgataagttggggttccaaaaaacaagcagacgaacggtctagccgacacgcgcgctgcaagcaagtagcaatggctaaactttaatcgatcaagacccaagaaaccctgaaggggtacctaactatttatagaggtgggaggacgaccaagagggtccaagggtcgtgctccactagattggggcgcaccccacatgggccccacatgggccagggtcccaaacaaagttacaagcccattggcccaatacaggtgacgcagcaccttgcttctgtgattgcggccaaacgagatagaattccgagatgaggctagatccgttggaaggaggacttcgagagctttccatcaagtactcacgggcccaaaacggagcacgtatgtagatttggcagccgtttgaaatcagcaatgtaacacgtggccgaatcagattgcagcacatggaggacttgatcttgatgtcttcttgttgattcatgatgtgagcaatggtcgtatccatagtagccatggtcacatcatcctccccttcttcacggaaaaccgtcctcggtttttctatatggtgctcttcgcgcagtccactgaaaacaacctgtttcttgcaatcaaaacaagacaaactcgagacaatatgattagcagtaacatgtctctctagcttgcatattttatccagaactacaagatgttctaaatccgaacaaatgtaaactctatgcaccaaaaatattcctctatcattatattcgccaaagatatgaaaaatagcattagttggacatggcaaatcagatttagcaaataatttctccttcaaattatcgagctcacaaaaatcatcaaactgaacatagcccaaagtatttaaagaagatagcaattcgcgttcctctacttcattagtaatgtgaacaacatgcttagaatcagcacacaaagaaatagtagaactaacatgttcattcactagttgtggcatggatataagtgaaacattatcacacaactcttctttatcacaaggaacagcaagtaaatcaacttgtgacaaaggcaactcagcaattgattccactaatggttgctctactatagcatgaaaagtggacaagtgtagctcaccttgagaatactcaccttcatttctctcagcaccatttaatttaccttgcgaactttcttcagacatcgcaggtgcttcatcctctttcttctcaagtataccattctccttttcttggatgtgctgatctttctgcaaaacgttagtaacaggggagacaaaagattgctcctccaatgtttgcacatcatcattacataagtatattagggattcagaaataggagataaatcacattggtcatgcatcctcgcctttgatatgatctgactctcaatgctacgagcaagcatgaataggtgcccaatatgattatatgtcacattatcaagcaaaacctgaatttcagaattaagcccattgaaaaatctacgcgttgtattttcattgcactctttgagaccactgtagatgatacagaccttaaattcatgaatgtactccctaacagttctgtcaccttgtttcagatgttctaatttctcccgaagagtacatttgtaataagatgtcacaaagcgttttctcatcatggttttcaattcatcccaagtttcaggtttattactaacataagtccaccaaaataatgcagaagaggtaaacttattactagcagccttaatcatttgagcatcagaaaaatcatatatatcaaattcattttctactgctagctcccaatcaatgtatgcaacagaatcatacttcccatcatagaagggtaacttagatgcaacttgttcaaaattatagtcatgtacctcatatgcatcatttggagaagtcgtcatatctcgtcgaaggtgtagaagttgatgttctcgtattccattacgcaatcctgccatggttagtaccaaacaagaaacacacaaaaatatgcatgctcctatcaactactaggtagtggcagctcaaatatcacacacactcaagcttttaaccaagctcttacaagttcttaccaaagcaagtggaatggtgatgtacaccgacttaaccaagcaccccaatagaggttggatgtatcgatgccttggcaaacacttgctgtacggctgcaatcagatctgtggagctctgggtaggcttaaatatgtagcaaagggatagcaaatgctcaaatcagagaatgcaaagttgaataatggttcaaagtcaagtaccgtgctggtcctaggctagaacgtactagagacgtgagcctagacacaagcgataccacaggatagcactagaaacaactgaggcacactctgatagatcatgttcagctcaaagatacaactgattttttttaacttaggcacactctgatagatcatgttcagctcaaagatacaactgatttttttttctttctttcttcttccttctttcttcttcttttttttttctctccttttttttggtgcggcttttcttttcttttttttctttttatgcaccttcctgccttttccttactttcttttttttattttattttttttctgcaaaaacaactcaaggacctcaatgcaagattactgggactcaaatgtaaatatgaaaattacaaggactcaactgtaaaagtccaaaccaaaattaaaaattatacaaaaatggaatgctgaatttatactgattccgtttttcgaaacggatctcgaaaccgacaccaaacaaaaattcaccaaggtgtttgacacaactcggaacaggcgaaaccgacgtgagagggagggagtcggactcagctaaagtgggcgacaaaaggagatggcgccaaccggtcttcacgcgtggggagagtttggaaagtttggtcttagatggaaactaaccaacctgattgatctagtctgcaaaacttcctccaaaaacagatctgttatcttttctttctctcctcttcctcgcgcaagagaaacaagcacggccgaatacagacgacaaacccttgatgcaactcagcaactccaaaaccgaccgacaaaaacttctgaaaactagaaaaacgaaaccccgacaacaagatgattccgttttcctaggtcccgacgacaacaaagacacggcgggggcgatgacagtggtacgaaacgtgaccagaactcgaaactctaaacgaactaaacgctaaaaccagcaatacgactcgacaatgcaacacaaaactcaacaaagcaaaaactgataaaaacaatgcaatggcacaatatggctaggtacaggatacaattttttttgtatggcaattttctggttatgggtagataaaactcaccgagcaacgaaagctctgataccacctgatggaccctgagttcctctcgacactcaaggctgttgttggcccgatctttcggtgagttgtgataactacgatttgggagaaacgttgacgatccgactacaaccgtacgagacgttgtgttgcgccttagcgatcgatacacctctccgtgggttgttgatcttgccggtgcaaatcaaccttcttcctgcaagcaaatcgaagaaacaagcaaaaacaagataaaagcaatctaaattgcaaataggagttaaatacgaatgataagttggggttccaaagaacaagcagacggacggtctagccgacacgcgcgctgcaagcaagtagcaatggctaaactttaatcgatcaaaacccaagaaaccctgaaggggtacctaactatttatagaggtgggaggacgaccaagagggtccaagggtcgtgctccaccagattggggcgcaccccacatgggccccacatgggccagggtcccaaacaaagttacaagcccattggcccaatacaggtgacgcagcaccttgcttctatgattgcggccaaacgagatagaattccgagatgaggctggatccgttggaaggaggactttgagagctttccatcaagtactcacgggcccaaaacggagcacgtatgtagatttggcagccgtttgaaatcagcaatgtaacacgtggccgaatcagattgcagcacatggaggacttgatcttgatgtcttcttgttgattcatgatgtgagcaatggtcgtatccatagtagccatagtcacatcacactgctgcgtgcttggcgtcaaaaacagaaacacaataccacccccatcctccacagccgctgctccgccattagagtgaagcagctgtagcgccacaccatccccacctcctccgccggaatcgcccggaagctcctcgatctgcttctctccctccacccaacccagaatgaccagatctgtagacctgcctcaactccatcatgccgttgatctttgcgctcgccactgccttcatcgtcgtcaccatcgccggccacctccgcaccaatcctttcccttctccggctgcggcacttcctcaactcccccgcgccgttggtcttcgcgctcgccaccgcctttgtcatcgtcgcgggcggagaagacggtgacggcggaggtggcgcgaggcggacgcggagcagagacggcgacggctgcggcgccagccgccaggtggaggtggaggcggggatagcggcgcgggtggtggcggtcagcaatggaggcggcggacggtgaagggtggaccggcggcggcgggcggccgagggagagggagagagagagggtgagacgagagggaggaggcggcgacgtccgggagagggagaggatgagacgagagggaggagggggcaaacgcgggacggcggcggcgcgaggcgacggcgacgacggtggcacgaggggaaggtggaggaggcggcggcggggagagggacaggatgagacgagagggaggagggagcacacacacgcggtggcggctagagtttgggtgggttagtggcatcatttcgcgaaaagctccctcttcttccagagtttacagcgcagtccgcgatttttatctccttcgcacagaatatccggtttccataagggcctccataaaaaataataccacataggtactgttctagagggacgtctatcgaattaaacggaaatcgaagggttttttgcaaaaatgccaccccgcgccgaaatcctgacgtggcatgccccctcgcccgccccttgcgccccccttaatatactccgatatttagttgactatgttcatgatattgaaactatacttgactagaaataatgacagtgtgtaataatgtcagtgtgttgcaacaggtaaaaatatttttgagtcgctatatattatactctctagttttggaccaaaagcttatttcttcatcccttttcagctcagcccagccttctatctccctttgtttggcatacctctttttgacctagcctataaatggagctgtaggctagcttgcatagttgactgccgtatccaacctcgaaggaccatctcgggctgtttggcatgcctctttttgacccagcccataagtggagctgctagcttgcatagttaactgccgtcttcaacctcgaaggaccatcccgagtccatactatgctagaactgatcatccattgaaatccgatcgaatccgattgaatatttctcgatctcccacaattggttgagggctttatgatacactcgattttctctttccgtttttatcaaaatcgagcgaatatgtaaaactcgggataaaattttaaattgaaattaaacccggtgatttaaaacgaaattgaaagggacaattattgaaaaaaatgatgagagagtagtggagaatcatttttgcaatcaattagaggagagaacgcataggaaggcacgcatgggaaggcaaatcgacgtggcggcaatgctaggagagaaggcacaatatgagagaaggcaacaacgtgcaaaccaaaagagaagacgcatgatttgtttctcgaagttcaaattcacggatcttacgtcaccgttgaggtgccataaaggccgggtctatttcaaccatttccccacaaggttccacaaatgcactcgatttcactcttgatttttcttcccttgcgaagtcgaaatcaaagtcttcacaaacttttcgatgcacaccacaactttaggtgtccatcggcgatacctagccatctaggagaccttagtcctcaagagtaacaaacacaatcgaaaaattgcttgctatgaactcaagtgctaaaagaatggagtgaagctcactagctctcaacttctcaatctctcaatcatactctctccccttctcaaatctctctcacaaagagacaccacaaagttaggggaatggggaaagctatttggctttggatgtgtttacttttgcccaagaacaacaaccactcaaaggaaggggtggaggagttcatatactcaagcctctcaaaactagcaattggaggtcaagattccatttttcagaattttcgaaacatttttggaaatatccgaaaaacaccttagagcaatttcactgttcgcagtcattttcagagtttcgattttttttcaaaaaactccgaaaacaacatagagcaaaactaggattactgctatttttggaatttcctaaatttttgataatttccaataaacaccagagcaaaacggccatagcattttgcttgggagtctgctattggtgatcttggactctatagaaagctcactcagagaactcctcaactcaaccaaaattaaggtctaaattctaaaaccactcaatggatagcttaacgcttgggtttctctcaaggtagcactaagataggtcactttgtgcaccgagacataaacaaaaacatcaaagttgcattgctaagtcaatagtacggtattgctatacagaaatataaataggaaaagaattataccaatagaaatgtcttcatgctatcttcctttgttttaagggatgccaacgccgaaaccatttcactgtatattcttcaaataattgatgcgggctcctttgtgccttcaaatggcctcacggttcatcacgacatagtcgtcactcgcccttcaccaccaaatttggtcctccagcgccaagcattacttgtgtttcaccgtcttaccatagtacttactttgtactccacatcttcgatatctttactttgtcattctttatatctttaggtgtcatgatctctcttgagcgtcaacacccttttttaaaaaaaattcttgggacctatttcactcattcaactcaatgaaattattagtcacaatgatttggttgtcaacctccacttgttgaccaactgatggtatggataaaatgatatgaataaatgatgggtattaatcaataccacaagttatatactcaaatgtgaagattacaattaaatgaaagtgaataactaggatcaaatatatgcataactaaggtatatgatttgctccccctaaatatatgcatacaaaataattttgagaaccaagagcatgcataaaaagatatgaaatattgggagtttatcctatacaaaaataaaatacatttatcaaatataggttctaaaataaatgcataccttcatcatctctatgttctcaatataaagaaagtaaacaagtgataaggctcaaacaaaacattgtctcacatacatatgtcaatcacatggaaatattatatatgagcatataaatatgtgcatggagagaaggaatgatacattatctacatgcacttcattgttgttgtgatttaggtccaccgtcaacgaacgtctctatctcaactcatatcaagtccgggaaccacctctcacaatttgcacttttatatcccacatgagacactagacaaagaaatgcatatgaaaatattagtgtcatataattggatttatcattagttgccaaaaccaaattaatgacacttaaactttcagtattataagtaactacattgctagagggaaaaaatacaagtaattcttcatgatactaaaagcaactacactgctagagggaagttgtcggtgatatgggcctaggggtaccccaaacagagggagaaggccgccacaaacccacgtatcgcctcccaaggggggtcgggcccaggggtggagcggtggcttcctcccgagccagaggtcgggtcgacccaaccccctcctcgctctgatttgcgtgcgcgccctgggcaggcgttcctagcgcccaactaccatgtttaataaggtctcgtctgccgcggcacgccgcatttaatgcggcgagcatgcacactgacaggccacttgcagcaagaatgacggatgtgacagcggacaaggcgttgtgcgcatgcgcctactgctagcagggggcatggcctacatctgccccgtcccgtcgccattaatgagggtttcttttgcctctcacttggactcggaccagcattttctccacgcaggtccgtttgagagatccctactccaaggtggggctggacggccggaagttgtcgacagttaaggagaaatgacatggacgtccgcccgtaccgctcggcatgatgggatggggcccatgtcacggtaaggcgcgcatggcttcacatgtcaggaggacaagacacacattaattacctgtaaaggatgttttcctttccctcgaagctaggtcttgggcctttgtggtaaccccttaagatataaaaggaggtccatgcctggggggaaaggaggatccgagagccgaaagcgcttgtactttcccaccagaaccaaccacacataggagtagggtatttcgcttacacaacggtgggaacctgtataaactgactgcgtccccatcactcccgaggggcctgaccccctctgcatcaccttcccttcatctgtcaaaccttcacccgcatccctggtctgaaccgaaaaggggccaccacagcccccgctcgaggagtttacccttcgacagaagtaaaaaagaaagaaagaaagaaatttacatcgattcgacagtagagaaaaataacacttcgcaataaagtaacccttcacattattagaagtaaatactagtagagaaaaataacacttcgcattattataagtaactacattgtttgaggagttataaacaatgataaaatttacatcgatttgacagttttgtggtgcagtttgttttgttttgttcctctgtattttgcatgatttggcacaggttcaaaggacgttggataatttgcattattctaaatataaattacttataagtacttctagatttgaataaattacttcttatatatttatgaaaataaattcagtaaagtctaaaagtaatccacaaaaaatataaaagtaacttaacacaaaataaaagtaagttatcaggacatttaaattaaaagtaaattagttgtggcggtaaaaacatgagtctatatagaaattaaattgaatcaacataaattataaattatagaactaactaaaaacaacagtaaaagtgtcatattcacaacattataaatgtctaagaagtaatttaatccaatgtaaaagtaattaacatatttgataaagttaactaaacatataataaaagtaatttacaacacatatatttctttcatcaaaatataatcatatgatatcttcttataaagattaaattgcaacgaacataatgttatagtcgggctctgtatcagataagtaatttaagagaatttatttaaagtttaggtagtaggtgggctctgtggccaaggcaacacatgatattgataggttggaaaacttcaaaagcattgtgtgtgtgtgcgcggtattatttttggatagtgagaggtgtggaggtactatttttagtaacagcaaagggttgctgcttagaacaatcctgtgcacaggcctgatgtagtcacctccttgacaaacataccccaagggaagatgaattttatccctactagcaaaaatgctcgtgcgttgcaacgggtgaaaaaatttcaatgccaatatacgcttcacatgcataaccatgtcaatgataatgtttgtatcgattgttacagctaaaacatgtcataaggaaattggaacatcttcaatgtaacggttcaacctcggcgacgacaatattacctatgcctcctttacccaaaaaaagaattggattatttatgtggttgtacacatgtactctttcagtttcattctttgcaactaatagtaggattaatcaaattctacactgtctcgcatgatctcttaatatatatattatttttacggaattgctatatctctgtcaacagattattgactgctcaatctgtcattttttggtccattcgttttgttctgtgattcgtgcatagtctgggtttgctctgtgtgctggattgggttatctggattggattgggcttagtgggtcccacctttactgttcaattttgaaatccgcgcctactttctggttccttccgacacggggagagagtgaggcgaaatttctttctttttcctcttttctctcgtcgtctccgtcgaggtgattagcctggcgaatcttctcgttgctggcttctcgccggcgtctcgccggtttgtctcttgtggtttgcttgttcctcttttcatgagcgtttgtgcttgcatcctgctatgttttgctcttttcccctactttttttttgtggatttgctctcttcttcactgttcgccgctgagttttcatcaatgtttgcgtatcaccgccgtgccgtgcttgtgtgccgcagtgccaagtaaggtggtgattgcatcgatttgttcaactaattcgtgttttttaatttttttattatagggttttctctgtgttttgcagcgatctggatctccttctacgagttaaatatgatgagtccccttattttgttgatttatatggatccatttttttgctcttttccctaactttttatgtggatttgttctcttcttcgttgttcgctgtcgagatttcatcaacggttgcgtatcaccgctgttgtgattttgagttttaatctctatttttgcgaggagacggcggatctgttcgtcgacatttttcttcagcgatttgcttcttccctgattcggccgtgtgtgtggttgaagcctttgagtttttgttgcttttgcccctattttcattgttttctattgtgattttgagttttaatctcaattttgtttgggttgtaggttatttctttggctgaagcgtcgatttggagctggcatctcaggtgagttatttgagtgtttgttttttttcttatttgtatgtgaatcggtggatctcctgtttggtgaatcctgtagtttatgggtacaattgctatggatttgtaaaatgtgtttgaaatgaatcgatctgatgcaaacttgtaaggtggctcatcgtctggcaagagaagctaggccaactgttgtatacttgtctgatttgaagcgtgctgttgagactgcagaaatcatagagaaagcctgtgatgtatcaaatgtgagttctagcctactttgtcctgcctgttccttcatgagtaacatcaataatttgtttcagatagtgttgactgaagcaccaagagaaaggcacatgggatatctgcaaggtttgacatgggatgacactatgtgaataaaagcccaggcgttttcaaaggctttgctaattttgaagttaaaaatggtttggactttgatggcagaaaccaagaattgccggtaagttccaaaccgtattttttctttggaacaattataacccagaaatgtaactttgtctaggtctgttaaataaaaaatggaataagtgtataacattttgtagctgtagtactatataactttgaaaagtttatcactgtttcaaatgatgtttagggtggtggagaaagtcttaatcagttaagtaagcgctgcatctcctacctgaacaaagttgctcagaatcatatcagcaactatcataaaaaaagttgaacttttactccatttcatttgtgtatgccattttgcatctaatcctgactagctgctatcctaccaattaagaactctgaaccttgaagatgttttgttgatgcgggtgattgttgtcggctatggtgcagccatattggaactaaaatatttttacactgacaggggagctttgttatatctgcaggtttgattttggtgaccaaaatatttgattttgtatcatttacatgaaattgaatgtaaaattacaggtttttataactgtaaatttgatataaaaatactgtaattttataaagatggttcatacatgtactttgtctatgtttcttgactatcttgaaaattcccatctttaacaccttcagatggaatattgcataaatcacttttgatatatacatacacacacacagatatatatatatatatatatgtatgtatatacacggtagcgctacatggcgcgtcgcacgcgccatcaatttcctagcgctcctctgatccgctctcgttccttgttttccgtttttcttgccagctcatcatatccgcctccacatcccttccgttttttccgtttttctccctatcccgcctacgcaccccgtgttctcactcccatccgagtaaaaaaggcgatactactcatctatcctctatctgtcccccttgttaccgagttaaaaaattatttataccatacaaatatctagagtggtgatttctatcccgaactcaactatgagattgtataattttttcagttaataattatctatgatattgtaagattttttcagttaaaatcttactcttttaactttttactgtatctgtaagtttcagattcagatttagtttattttgtatgttcctcattcagagggagtttggtttagtcagctatgaaaataatgtatcttgattggtgtgccaaattctgaaacttaatcctgtcaatttgaaaattccaagtatattatctgatgatttgatttagttagtaatcttacgttgcaaagattgaaactaaaacaatttagtatgcaagattcatagtatactaatttttgataagttatcttgcatattagcctgaaacaacactgaaacaaaaaatcgagcaagacgctttcattgttgatttctgcactggtattttcatatgttaattttctgtctgccaatttgaccgaatgtttcattttgtttccatttgatagcagagtcgaagtactttgtacattaacatccaaatcaaaaaaccaaaagaagattctaaaagtttgaggtgtggtctgaattctgaattttagatgcaatttgaagatcaagaaacaaatgaacatgtcactggattcagattcagaagaagattcaaaacaaggttcataaagtggtaaatgtaccttcagatttattaagtgcttgaattttgacttcaactctttccccctgtgcattgttcgtgatccgcttttgctcctgaatttgatctttgacttttcttgtacctgcaactttacttgcaaagtatatgaaatctgatatgcttcatctgaaatctgatttccatgaacgttgtgcagttggtacataagtaatataaattctctgatatatagatatactttgtgtagtttctagatacatgcctaaatctgatatactctgattttttttgacatatttgctgttgactttggatgtaatataaattctctaaaatccaaattttgatataagtttggttatgaatatagtacatatgcagtacatatttgcatgagttctaatatgaccagaaaatatgcaatgcaaaagtcatatgtcattatgttgttcaacctaataatacacataacatttttgtaaagtcttaaatctacaagatatcaattacatatttttagtattgaaattacagtttttgttttatgtaattcttatacaaaatgactgtaatttaagaattaaatttagaatgctggtgaatattctcaatttttgaagcattgcgtttgatttgaaatgtttatggcaactttctgtaattttgagttaagttttacattataaggtttggttatttgaatattttgcagtcattttttttttgttttgaatctctgtttatgtatgagttctacatagtttatagattatgtgtttatatttcccctaatagagatttaaagattttttagttctgcatgagttttgatatccgattttgcatataatattcttgttctccactaatatttctcaaatctgttgaaacatgcaatgcaaaactcatatatcatcatgttgttcaacctaagaatacacataacaattgaattctaagataatatgatatgtgatgtttatataaagtctttagtctacaagatgtcagttacatctttctattattaaaattacaatgcttgttttatgtaattcctgtacaaaataattgtaatttaagaaaaaaatttagaatgctgctgaatattctcaatttctgaagcattgtgcttgatttgaatggtttatgacaactaggagcaatttttagtttagttttatattataatttttagttttgaagtttgatttgattatccaaatactctaacatatgtttatttgcagctatatgtttgttttgcctgatagaggtattgcatctaattttcttattctgaactaatacatatgagtacagaaattcctaccgttaatttgttttgtaaagttctgtgatgtttctgtaaagttttaagtcaagaattttttttgttatgaatttaactggtgattaattttgatagatgaagatttatatataaaatgtagacccataactcagaagatatttttttggagtgatgaagctttgtgaattttttttgatggagattcatatgaaaatccgaagctaaacactcaaatatttcaatctgtgaacactctgaagtcaatctacttaatatatcaccaattgaacatttctgatttctgatttgaggtgtgtcctgaattctaaattttctgacatttttgttgctgtcagtaatatgtctgaattctgaattactgattgacttgtgggcttaattctaaatttgttgttaattaattagctctgcaataatgtgtttgactcctctatttctgattgacttgtggtctgttctctgaatttctacagtaatgtgtcagcaactctacattctggttatctaatttgagttgtggtgtgctgcattagaagggtcctcagagtgactttaacttgttgtttaatttttacagttcaatctcattcgacagaaatgtagatcaatattcagaagatttgagttaagttttgtgatttattctgatgaagattcatatcaagaaggttcaaagaattctttttctccctctaaatcctttctgagccgttgttcttttatttgggcctttaaattgactacaatgttaatttgggatttcatttgatgtaaattttgtattcgggctcaatctgggctatttgattgggtcaggttgtgttgagccctttgaaaatgggcttccaaacctgtttgtgtttgttcatttatgtatttttaatttttatttgtcaaataatattagctgttggatctagatctgttggttaaaaaatttgacagattggaggtccaaaaatctgtcgatagtgcactagacagtcccttatttttatatgatgcgctattaagaatattagttatacttagcaaagtagtctgataattgcatatagagacgtgcagggcctccaatataggacaatagatcatggaacacaagccatgtaggagatggaaacaatcgatggattctatccgacccaagcctcgatcaatttgatctcgttccgagaaaaaaaaaagctcaagcaagacttgttttagatccgcacatcagaacattccatgaacgctttggaaaaaccaaaccgacgaggtagacgataaaaggctttttttttccaatggtacaacagctattaggacttgaggaataaattgaaaaggcgttgcctcctaccttccttcactcctcctgcctctcttagctttaggaatacatttatgtgttcgtatgatagcagagccgatcatccccaccaaatctagttgaatatttttcgatctctaaaaatttatcgagggcttttgatccacttaatctcctctttccttttttttcccaaagttggagcgaatctgtaatacttgggactaaaaagaacagggaaaaatcgtcggtcggtcatcattgacaacagttaaatggagattaaatccaacaaattaaagccaaattgaaagagaaaatacaggggaaagcaggggcgaatccaacgtgggtgcagggggtacccctggagtacccctttcgattttttcaccatgaatgataaactaaaggtccctagatggctagaggttgaagaaactgtgtaattgagcgccccccctaattttttgttcttggatccgtccctgggggaaaggatgagtaaggagtggagaatcgattttttcaattaactagaaaaaatgcctgtgcgttgcaacgggtaatgctattttaattttattgttgttatacggtttagctagggtaaaattcactatgggaattcgcttagatatttttttcgaaaatcataagctgcaagagtccgtatttcatctcaagttagttagcatgcaggtttttttataatggcatggttctaattttccctttttttaatgatatttcttatacgactcttttttatttccaaaagcaaatgagcttaaaatacaacttaaacacggatctgtatttctaaaagcgaacgaacttaaaaacctactcaaacacggatgacataccaaaatattgacaaaaacatcttcaatttttataatagtagagattagaggagaaaacgtacgaggaaacagatcgatgtggcggtagccttagggtttagctcgggcggtgcagcggtggatgtgatgtggcggcagccttaaggttcagctcgggcggtgcagcggtggatggaggcgcgcgatagcggaacggataccggatcggattggacacctattgagacgttttttttccctttttttaactagaaagactgcctgtgcgttgcaacgggtaaagacgttttttcaatgatatattaagagctgagcaataaattgaaatattgggatcactatacattataattgaaaaaggtaacaaaaattctaatattgggatcgctatagattataattgaacaagttaatgaaaatttttcatgggttttggaccgaaagccttccttcctttttaaacctaggccagtccgccaccttcctccatttggcctgctgccttcgacccatcaaatccctccctccatttggcctgcttcattcgacccataaaagttcggccgaatctttctctatcaccaaaaattggttgagggcttttatccactcgatctcctatttccctttttttccaaactcagagcgtaaaactctggataaaaacgataagggaatatcgccatcatcatcgacaactgttagattaaatccgaccaaataaagtcggaaaaatcatggagaaaatgataagggaggagtgggaatcgatttttttcaatcaaattagagtagaaaacacacgatcgatatggcgtcggcgcggcgccagggttcaactcaagagacgtgcagcgaatagattggattagaaaaccggatgaggaaaaccaaaaacgcacggagaaaaaaccggtgacaatgaataaaacaaaaggtccatgaggcgcggtggacagatcggatgtaaaaaaccggaaaaaaaaaccaatagcgcgtgcgcacaaaaaaaactcttccgcgtgaaagaaaaagtcggacaaatacagtggcaagaaatccaaacggactttttttttgttttgtttactggcgagactttttcttttccttttttttatggagtcggtcgatttgtttttccttttttttttactgacagcagaagcttttttttatcgcttcatgagtcggacattttttttctttcttttacctttttagtcggactttttttccttttttactcgggcttttttttcctttttttactcggactttttttttcttttttttaccgactatggaaatttctcgtactttttaagtagagatagagattaaaacagaaatataaaattaaaatcgatttaaacacggatgccatatcaaaatatcggtaaaaacatttttaatttttataatagtagagacgtacgtgaacttttgtttgtttaagggagttggacttttttagagtcggattttttttaagacagaaggtttttctcgctttttttttccgttttctacggttttctcgcttttttttttcctacggacaaaggaaacatatctcttattttttaagtagtagagatagtgttaacaaccaaatttcgtaatccaagtatcggagatggagataaaaccgaagcggaatctaagatagaaatcgttccggaaatagagcaaggatcggctaaaatccgaatcggccgcgaccgagatcggcagagttcgagtcggacaaggttagttgattgagctgattccgacaatatgactcgatacacgacatcgagttagattatggtgcttcacatggattgccatgcacggattgagtcctgagaaggcaattgtatctatttattaggatattttacgtaatttccttaaagataagtttaggcaaaagtctgccgcaaagacttatggtatcttaaagtttgttagagataagagtcgtgtccgacatggacatattttgtaatctcgagtataaatagaccccgagccccatgtaatcaactaacacacgtttaatacaatctcggcgcatcgccaccctttacttttgttttgttttgacgagttcttgctttcgggttgagctgcatcgatttcgatctttaactagaggtaaaacttgttatggcggcttgcgttctcgggattagtgcttccatctttatgacactctaatcttgtttatgtaattcgtcgagttatcatatatcttatataatctttgacaatattactatctaaccttcaatcggctaacatctatcactggaaggcagccgattaggttaaatatcaacattggtttagattatatagggtatctaccaccttatgaaacatccaacggcttgattgtctagatattgttcttcttttcatacttatagctgcatcagttgagtttgaccttataagtcgtgattagaaccataatctctagcctgtctttggttgctgattagggtagtatcggggtttcagccgatcttacctgatttagctttatgttttatgtgcttaattgatatgctagatctgccctttatattaagatcttgttacatttaggtatattaggcttcctatttgatatattttgcttgctttaatatcttaatattgagtggtatcggagtattagccgatacatgctagatctatctgatcggctatgttatgaatgcttataatcttcttgtcaatatatattttgacctaagtgatttatactgtctcggcatggcgaccgatctacccaatcacttgatttaagtatatatcgacataaggattatataccattaatacctacagccgatcgaatatatttagttctttcttacctatttatgactgtcgatcgattcaaatataacatcggctcaaagataaatgatatgtcattggcagctggccgatcggctatcatttatgtatttgaccatggtttctttgtctttatttcttgttgattgcaggatcaaatcaactggcacactcacgaacctaaaggcaagatttttggacctgcactgaagttaagcagatcttctaggcttcgtgttttcgcatcaacagatagagattaagctatcacgtaatcgctaacccaaaaatagctcgatttaagctggagcataaaataatataagatttgaaaagttcagggacaaacaatacctaattaaacaaaaagtttacggatacaaaataatgttccatttaacttatcacacagtacaactctattcattccatattaatcatcatataaccaaaaattaaaaattccatcatataacccttagagtaaggtcaataagaaagcccattgctggttacaatagatgaccatgtcatctatagcaaacaatatagccattgtacaatagattaactgtaccatagatattttattatctctaggggacccaccatctttccccatctcttcctctcaccttttctaatccggtcctcccgactacggtgaagcacgtggacgacggtggcacacactggcacccatggcggctggggcggacaaggacgccagctgcggcgaaagagggcgacggcgacacgacggtggcggctgcactggacaaaggcggcgccggcagacagacgtgacgaacgcaatggatgagctgtggaggaaaaacacaacgatcgtggtggaccaagggcaaaggcggtggccaacgcgagcgagggcggcggccaagccggacatgggttgcgcgatggatgtggtcgcagccgaggcggacgcaggcaacgagcgcggaggatgaggcggatggtccggcgaccgcaacggactaggcggcggcagatgcagtcgacatcgatgggcgcggtcaatggtgacagtgacaacagcggcgacggacgcggtcgatggcaacagcaacgatggtgatggcggttgcggcggacgcggacgaggacggcagcggacgcagatgagggcggctgcggcggacgcgaaaaagggcggtggcggctgacgcgaacgatgacgacggtgacggtcacgatgcacgtagtcgacgacgacggcagccatggcggacgaggacatcaacggcagcaatccggtggagcgcgatgctcgtgtacatggcaacggcggcttgcgcggtgcactcccatcgttcctgttgggtctgcgtcttgggcagagagtttagtcggtcgactaaattagtcgccctctcgttctctctcttcccctcctcattaaaaattcctacgaagaccatctaccacctattattatacctgctcgtgtaacatgtagtattattcattatacatataaattgagtttgcacgcatgcatgcatttggtgcacttttttttcccaccacatactcacattaaatgaaatataggaaaattaaggcttctttaatcttgtgaaaaacttatatgatgattaatatggaacagagggagtactaaggttaactaaaattccgttcatcaaacctaaccaaaattgaaaattaggtcgaacaggatcagagtccaaaccgtgctagagattccataccaatgttatttccatttgtcaaaactgggaaaagcgtggtggacttgcgggagagagctggacgagcataaatacaggatttctccggtatctacccgtgcgctgccggccagtggcgaagccagcgcaaaatagagggagtgcaccactatttttagcggtatacttgtttcgtttttggaaaaaatcaacttctggctacgaatttagatatagggtatgtctagcttagaggctaaaactttgttttgtatgggacggagggtgtatgttttattatatatacaacatagaacgctataacaataccagtacaattattttcgatagtttcacgtaagcaagaagagtgatgtaggaaataaaattctagcgatgaaagtgcttaccaaaacgggaaacccaaatgataatattgcttagtatgttcagtggcaaaaaaaaaagatttgatgaggtaattaaagtataagcttgatgaggttggctgctgggcatcacgcatggccccctgtgatttgattaacagcttataagcctacggtggtggtgacatttgttatggctacgtctgtgagcatatacggttgtgttggctacttgcttgttatcttgcttggctgattgttttgtcaaggagtacacactgttcttccgaggggagtgcacctatggtggatatgggataattacatgttaaaagtttttctgaaccggtgccaaggaaccccctccatcaatgcagcttcgcccctgctgccggccttgccaaggccccaagcccccaacccctacagggtgtcgtgtcagccacccccgcggccccgcccaggtggcccccgttccagattccgcatcgctcccttcgatccgcggcatcctccgctcccctcgtccaagtcgccttcttccttatccaatcccctacctgcgcactctccagactcgcccagtaaacaaaaacaagtgggtcccacatccgagccgaaggaacggaatccccctccgaatattcaccaccaccaccctccttttacttatttccgcccgtcccaatccagccacccgctcgcccgtccgttcgattcgacgacaccttcatttttattttcttccttgtgtaataagaagacgactagtggtaacaaaaagattcgctccctacgcgacgccccgaccccgattcccttcgcttcctactccttcctcttccttgttccttccttccttcctcaccccacgaacgcgcacaccaacctttcccatccctagctgctgcccttccatcggatccacggatcgagacctggcacggcggcggaggacgggccggcggagatggaggtggaccacgcggaccgcgacggcgcgcggcgccggtgccgcgagtacctgctcgcgctcgaggaggagcgccgcaagatccaggtgttccagcgggagctccctctctgcttcgacctcgtcacccagagtacgcgcgcgcctcgctcgccacgcattcttcgctcgatcgctgcgcgttcgtgcgcgtgagtgctaattgtgattgtggtgcagctatcgaggggatgaggagccagatggacgccgccggcagcgaggagacggtcagcgaccagggcccgccgccggtgctcgaggagttcatcccgctcaagcccagcctctcgctgtcctcctccgaggaggagagcacccacgccgacgccgccaagtcaggcaagaaggaggaggccgagacgtcggagaggcattcgtcgccgccgccgccgccgccggaggccaagaaggtgacgccggattggctccagtccgtgcagctctggagccaagaagaaccccagcagccatcgtctcctagcccaactcctaccaaggtaattaattaataggttaatttatcagcagatgaaaatgttttcttgctagtttgcactactcttgatctacttttagctaatgcgtcgatctctgatgaactctgccaggatttaccgtgcaagccggtggcgctgaacgccaggaaggccggcggagcgttccagccgttcgagaaggagaagcgcgccgagctgccggcgtcgtcgaccacggccgcggcgagctcgaccgtggtcggagacagcggcgacaagcccaccgatgatgacacggagaaacacatggagacggacaaggacaacgacaaggacgccaaggacaaggacaaggaaggccagtcgcagcctcaccggaagcctcgccggtgctgggcgccggagctccaccgccgcttcctgcaagcgctgcagcagctgggcgggtcccatggttagtgccattttttctcagtgacagctcgaccggacaaaccaaattacattatcctatatcaacaaacagtactgattaatctcgcttgtactagttaattacgagctaattagtcccgtgcttatgcagtagcgacgcccaagcagatccgggagctgatgaaggtggatggcctcaccaacgacgaggtcaagagccatttgcaggtcagcaatggcggacactactttgccctaatttaactcttaacacacgcggataacctgtttactcctctcgatcatgtccttaatttgtgtttcgcttggggttcacagaagtatcgtctacacacgaggaggccgagctcgacggggcagagcagcgccgcagccggcgtccccgccccgcctgcgccgcagttcgtcgtcgtcgggagcatctgggtacccccgccggaatacgctgccgcggccgccgcacagcagcacgtgcagcttgccgccgccggcaataatgcgtccgggagcgccaaccccgtgtacgctccggtggcgatgctgccggcaggcttgcagccgcattcgcatcggaagcagcaccagcagcagcagcaaggacagagacattccgggtcggaaggccggcggagcggggacgccggcgatggcagctcgtcctccccggccgtctcgtcgtcgtcgcagaccacctccgcttgattagtgtagattcgtcgattacatcattatatgtacgtagtacgagagtgcatcacatcaaagtgcagcttgattttggagctagctagcttaaattaagggttaattactgattgcttcgtgatcgcacacaccacatttgctgttttgtttgtaaaaaagataataaaatacataaatattaaggaaactccatagacattattctcccttttttttctcactttagcgtgctaattgatcaacaaaaccaactgtatgttactccttttgcacagcaagataataaggttgtgtttaaattaactttttttctcgaacttccaatttttctgtcacattaaatgtttggacaaatacatagagctttaaatgtggaagaaaaaagtttagattccaacttttttctcaaaattccaacttttccgtcacatgtaatgtttggacacatacatagaacattaaatatggaagaaaaaaaaccaattatacagtttgcatgtaaattacgagacgaatcttttaagtctaattacgtcatgattagctataaatgctacggtaacccacatttgccaataacggattaattagactcaaaagattcgtctcgcagattacagtccaaatctataatttgttttgttattagtctacgtttaatacttcaaatatgtgtctgtatacatcaaaaagttttagcaatgaactaaacacggcctaaaatacattttctcgttgctgcttaatttgtgggtgataaaaccaactgtatgttactcgttttgcacaacaagaacctcagaaagttcacgaaaataaattacctctacaaataactacgatgacccccacacgctttaagatgatttgccatgcatccaattggaacagtagggctaaaacggaccacaataaatattttatttgccattaaatcaaaacggtatcagattttttccactggttaagtacctcaaaacattcacaactacacatcctatactacaaatttgaacattattatatatactctgattaaacttattatatcttatactagattaatttattttaaaacggagtgggtactttatcattgtatcttcattctgtgtaaaggcaaataccacgaaacaattatatgtatacacatcttgtttaagaacataaccatagaaatatttattttaaaacagagacagtctacatgcttattaaagttacttaaaaaaatataacgatgtcaaaatgttttcgtgataatctaccaatatcatttttatatgccacattcttttgttttttgcaggtaccaaaaatattacattttgaatttggccataatactacacgtatcataaaattcatgataaaaaacaatcgtctactttgaaacggattgagcacaagacatcaagcatcgttggagaagccagtcacagccattggggcattgggggtggagtgatggtagcacgcagacttgtggctttgcgtacatacagcatcctagttactccctccctccgtccccaaaaaaaaaaaaaagacaaatcatgtgtttccgtgtccaactttaactgtctgtcttatatgaaatttttttataattcgtatttttattattgttagatgataaaacatgattaatactttgtgcgtgacttgtctttttaattttttttatatttttttaaaacaagacggacggtcaaacgttagacacgaaaaccagggtttgcctttttattattattttttttacggagggagtaggtggatagagcatcaccctgggattcttttttctccctctggtggaatgttccctcggcgcctcgaatatcccgtaccgatacggggaggaaagggaatcaagctaggtatcttgggtgcagccaaccttttagactttggagttgttgctgccagtgccagccaagccaacggacggatcgacgatccctctccccgtccgcttggtccctttcgtctccgggggccagggcaacacctccactttcgatatacacccttggcttttcggcttttcgcggcgtcgaggggccgtttttcatttttggctgcgttggattgtgttcttcgatttcggggacgtgcgcaacactggatcgttactgtaccaccgaatggcgctttcgaatccgtacgactactattgttggagcattaaatgacgagaaaacctctcaacgcgaagccgaatctgccacggctgtttgtttaaacctatcttaccgtaaaatcacgtcccactaaaccctaaaacttaactcacttcatggcccattaataattattacatcttaaataacatacaaacatgctatattattctatttgtcggaatgaaatcagaaccattccggagcaaggagctggatgctctgagatgtctttcagccggtgggttgatctgatgtggaagtcaaagaggacatcagcatacattgcttgtgactccttcccttttcttgatcatgacatgtttacaacatccagcaggcagaaaacaaagattatactggttcaggccccttgatagggaatagccctactccagttgatatgggattatatgatggaaaccacagattacaaagggaaagcggaactcgatgataccgccgagatcgtaatcgagaaggtccgattagatctcccggcgacttggctcctgtaggcttcaactccgtaggctgtggtggatgtgttggctatgagattcgatgccttaggtcctcacggggtcccttttatatcgcaggtcaactggtctccaagtaggactcgaagacatcggactcggcacgatacaatgacgacccagtcttgtccaagtaggactctttccatctgtgaactccatggcgaatttccttaacgtgtaccgaagacgtccatatacgcgcaagtataccatatcgatatgtgacgtatatcgaagggtagagggtataccttacccgtaaccctgacagtagcccccgacttctgcttaaatgaactcatgtaaccgatcgtgacttctgatgtcgaggttgttgtcattctcgatgtgaggaccgagagacgaggagtaatcgacaacgcccagtgaagctcaacggtcatgagtgaatttaaattgaagtttgaaaaactgccgcgcgtaacggacccagaaatttccggcggctatctctctcctttccttggaattcgcaccgtcggaagtgcgactatttaagggagttttggggatccatttcgaagtccgcctgttgtgaaaagactctccagcctccaagcgttcctcgtcttctccgctcctgcaagaagcctagctagttcatcttggtcccttctccggtggtctccggtggcaatggatctcgacaagtccacctctaccagtgcgtcgctgaagaaactgcaggaggatggcgcccttcccggtcgcgggaccatggagagagaagcaggaggtactgaaccccagcctgtcctgggtcgcatggttgtgatcgaggactttattctctgtggttttcttcctccgccttctgaatttcttctcttggtcttgaatttctacggcctttccttgctccatttgaaccccaactccatcgccttcctcagtatcttttcgcatctttgtgaggcctacattggggtagagccgtttcttgacctcttccgcttttactatgagttgcgctggatggaacctaaaaaggtgtccggatgtgtcggtttctgacttcgggatggcctgaagtcatgatacatccccttctagtgcccctcacctcgcagcaagtggcgagggaggtggttctatcttcagatagaaaattcggatccggtcttcattgttcctatggagcaaccagacaagatttcatcttggaccgccaaacccgcctttgaccccgtccctccaatctttcatcgatatcattgatgacctccgagtgcgggggttgtcggggtatgaagtcgctgccaacttcattggtaggcggatccagccgctccaggctcgatcccacccagcctttgactattctgggccagaggacgcgacccgggtttctcctcggggtatttttcttgtatttgaattgacttccttgtgtgtgtgttcctcctaacttatcgaattatggttctcgatctacaggtttgagcagtgaagccgtggagcgccacgtcggccaactgatgatcagcggcccgacaacggcgagcaacgtccatgtccccctttgcgagaaaggggcagacgaacgcgaagctgccatcaacgtaagtgtactcagcagcccttttgcatttttcttccgggatcgcattgcgacttcatgaagcgtaggctctccctctgactgatatcatcgggccgctcgtgaatcatcaggcggcggcgtcgctgaaggaggatgtcgccaaggaggcgtccgatgttgctgccgctactgccacaacgagtagcgaagcgtcccaaaaagggggaggaaattctcctccgtgatcagaaataggcggaagacacccacccctcggtaagctctcctgttccttcatcacgtagtcggaaaacttccacctcacatcatacccgtcatactccaggcttcggacgcgtctcccccgccaccgcgacggcagcggcttgtgacgcttggcgagaagtaagtggatgaatttgaggtttcgtcacttcgtcgaactcttgcagccagtctcagctgcagcttttcacagggcggcacgggcgaaggcggcgcaagacgggtctggggggacctccaacgcgtctcctgctgtggcctcgacggatgttgtggtcgtgcccaggagccgcgaggcgacacctagcggcccagacagcgatctcgcggctggtcggggtccgccggctgccgtcctcacctggggagagctccaggtcgagatggggcgtctcctcgaggccggttctcgcggcattagccgcgagatcgcggaggtgagggtggcggcggcatcgtcggcgaatgagcgcgccgaccagctggcgcgcgatttggcggaggttcgcgaggacctccagaagatgagggagctggtggccggcaatgagcgacaacggcaagggctcgagcatcgtatgtcggagcttgagaaccacttgtcggagatccgtggctcgctgtgggtcacctacactggtctgcaccagctcgccggggagtgcagcgtcaagcccaccatcccgacgaatcccgacgagttctcgctgacgtcttcgcttgcggaactagcgacggtgatggaggcgatcccctccaagcacgcggctaggatcggagaggagacgtccaacgggatctataccagggcgtgccatgtccttgcatgtgtgaggctggcgcaccctgaactcgatctgcggaagatcttggatcagggggcggctagcgacgcgcgaaaggacgtgatggaggaagtcggcgatctgggggagtccgttctcccgctttttgaagagtaggattttggctcccttgtactctttagtcatgctttgtaaaactctcattggttccaaccgcctttgtgtgcagtcatcaccttagttttctttagcattttgatctcgagtactttgttgtcgtttgtagagatgttgatgtcaaggatgtccagcagcgcgggcagcctaagttgccagtgatcgttccggcacttgcgttcgagacacatgtgccggagggcgatgtagatcaaagttcgcctgtggaaatgagcatggcgacgactcccttaggttggttgtctttgttatcatctcctttactcttccgtctggatcgacttgatttgctgtattctcgagagagaagagcagcttgacttagtcgtttccatgctgagtagacctcgagagtgcgcttgctgactaggatcgtcgcatccagtattggaggacgaagtttgaggtcgcggaactcgagaggactatgctggaagtgaggaaggaccaggccgtagagacactccggggtcgcgaggtgtggttcaactcgtatctgaagagttgctgcacctccatgtcatgagtttgtagagagctccgagtaccccgtggggatcccgaggaatcggcagctggatacatcttgtggctgaatagggcatgcgcccagctcgaaggcatcggccagcgtatcgatgaggccctgaagcaggagtgtcgtcgatcgagccgatatgccggggggcatgtattggcttgcatacgagatcatcgtccgcagctgcacctcgagttcctccatgaagggttttctcgttctcggagaactcctacggagatagatggcctggcgaagtcgatggcgccgctggcggagaaagtcttccagtccatggactggcgttggcctttctggtagtctccgtgtcctgtgacaaatgtcttaggaaaaagtgtaatataattttggatttttgtggaattgtaagaagtacttgtgaaatagaaaagaaatctatctaactaagcttccttactctagatgtagcgtgtatgagtgtcttctcacttcgcgacttcgatcagtcgtttgagttatacactctccctagcccctagccttgtcatcggagaattcttctcggaagataaggctcttagacctttgacctgcctcggttgaacaagcactgatcctagcccccagccgtgaagttggaaagttaatttccgattacacggcttggttaatacgcatggcgagaactctgacatgaccagatcttacatggtctttcgtctctacaggatatgacaaggccttatcggctctgggcatccccagccgaagttcccttaggttccttggaggccttgtcaagacggcgtaaagggacatgaggataggttttaatgctaggtgtcatctgggtaagggatcatcaggaatgaacactttgattgtgatctgtacctgaaaataggctttattggagctgtaagatgtcttacaagtatggatactattgacttatacatataatttacgtaattgatcaatgttctaggaatttgccaactcgcgaccatcgtcgtctgcaattttgaatgcgtctggccgcaagacttgtgtgatcttgtacggtccttcccatttgggtgagagcttgttttgccctgcttggctttgaacccgtcggaggacatagtcaccgatcgaaagcgtgcgtgctcggatgcgcttctcgtggtatcggcgaagggcctgttggtagctggctgctcgaacgacaactcgttcgcgatgttcctcgagtagattcacatcgtcgtttcgctgctcctcctgatcctcatcggaatacttctgtacttgtgtactttgatgtcgtagctcggtggggagcatggcctctgagccatacacgaggaagaagggtgtctccttgttagacgttgtcggtgtggtacgcacggtccatagtactgacgggagttcttcgacccacttcttgtcatgtgacatgagcctgtcgtagacgcgggtcttgattccttacagtactatgccgtttgccctctcgacttgtccattgctctgagggtgagaaaccgaggcgaagcagatcttgactcccagcctgatgcagtaatcctagaaatcggcactgatgaactgggagccgttgtccgttatgatacggtgaggcaatctgaatctgcaaaatatccctttgatgaatttgatggcgttgtcggccttgatttcccccgtgggtgtcgcttcaatccacttagtgaatttgtcgatcgccacgagtaggaacctgtagccgccctgtcctcgtgggaatggcccgagtatatctagcccccagcacgagaacggctaagtaagagggatagtctggagtgcttgcgctagtagctttgtgtgtttactgtggaattgacaggcttcacaccgctgaaccatgtcgcaagcgtctttgagggcggttggccagaaaaatccttgtcgaaaagcttttacgactaatgtccgaccagcggcgtgtgacccacagatcccttcatgtatgtcgaggaggagatgtctgccgtcgtcggacgagacacattttaggagtaccccgtttggcgtcctcttgtatatatcgttgccgatcatacagtagacttttgctttacgggatattttctcagcttctgcgtcgtcctcgggcaactcttcgctacctatgaatttgatgagtggggtgcgccagtcgtctgtggtcttgatatcggcaacggcgcgctctgcctctgtagcccccgagctgttgttgagggtaaccgggctatctttgccgcttgcatctttcactgatggtcttgtcaggacatccagaaaggtgccaggttcgagtggctctcatctggacgcacgccgtgctagatcatccggttcgatgttgtccttgcggtatacatgtcggacctcgatcccatcgaaccttttttccagcttcctgacttctgcgagatacttagataactcggggctagagcacttgtaatctttatgcacctggttcgcgactagttcggaatctcctttcacgatcagtcgcctaactccgagtgtagctgcagctcttatcccggcgagtagtccttcgtactcggctgtgttattggttgccctaaagttgaggtgaattgcatgcttgaattgatctcccgaaggtgatgtcaagatgaatcctgcccctgctccttggctgttgagtgcgccgtcgaacgccattgtccatgtttcgttgtcgatttggttgtctgacctgttatcaggcatagtccaatcggctacgaagtcggcgagtacctaggacttgatggctgttcgtggcacgaagtggacatcaaattggcttagctcgattacccatttcgcaatgcggccgacaacgtctttgtttctcacgacttcaccgagagggaaggaggatacaactgtgaccctgtgggcttggaagtagtggcatagctttcttgatgtcatgattaccgcgtagagcagtttttggatatgtggatatcttgtctttgcatcgtggagagcttcgctgacgtagtaaaccggtcgttgcaccttctctctctcgacaacaatgacagtgctaacggaatatggcgtggcggcaatatagaggaataattcttcattaggttggggggcaacaagtataggggaatttgataggtagcgcttgagtgcaatgaatgcctcttcggcttcctgtgtccatacaaatttgtcttgcttcttcagcagagtgaagaaatgttgtcctcgttctcccatcctagcgacgaacctgcttagtgccgccatgtatccggttagcttctgtacttccttgagtcttataggcgacttcatgttctcgattgccttgatcttctcgggatttgcttctattcctctaccagagacgaggaaaccgagcagcttgcccgatggtactccgaacgtgcacttctctggattgagcataaggcgatatcgtcggaggttgtcgaacgtttcccgcagatcatcaatcaatgagtcgcttgtcttggtcttgacaacaatgtcatcgacgtaggcctcgacattgtttccgagttggttgctaagtgcgccctggaccgtgcgctggaaagtgtttcctgcggttattagtccgaacggcatcttaacatagcagaataccttgaacgacgtgatgaatgatgtcttctcctcgttctctttcgccatactgatttggtggtagccggagtaagcgtcgagaaagctcaacaactcacaaccggctgttgagtccaccagttggtctattcgagggagagagaagtgatccttgggacacgccttgttgaggtcggtgaaattgacacacattctccatttcccgttggccttccgcaccatgactgggttggctagccactctagatggagtacctctctgatgaaaccagctttgagaaacttgttgagctcttctcgtatggcttgttttcggtctagtgcaaatctccgcagtttttgctttactggcttggcatcgggtcgtaccatgagtttgtgctcaatcacctccctaggtactcctggcatgtcggacggctgccaagcgaacacgtcaacattgtctcggaggaaggtgatgagcgcgagttcctatttctcgtttagtgatgtcccgatcttgacggtcttgtcggggttggcgctggagagtggaacaatcttaattgcaccatccggtttcggcgtcttggttgttttgctcactttcttgggtggctcagttgtggcataagggctaggcgtgtgctcaaccatgtcgaggctccgcttgtcgcattgcactgccagcttagcattcccttgaatagtgattgttcctttcggtcccggcatcttgagcacttgatacgcgtagtgagatgcggccataaacttcgtgagtgcagttctcccaatgatggcattgtatgttgtatcgaattcagcgacatcaaaggtgatctgctccgttcggaagttatttgctttgccgaaagtcacaggcaacgtaattttgcccaatggtttggacgatgactgaggagtgattccatggaagggttgatcggtgggagtcaactcgcttcgtggaatccctatcgcgtccaaggtgctggcgaagagaaggttgattgagctgccgccgtcgatcagaactcgcgcaaccttgatattctgaatagtgggttcgaccacgatcggatatcgccctgggatgacagcagtgttgtcacacctagaaatttaacccaaatttccagactattttgcgtattaaatccctgtccaggaccagtcagggtacacaaaacgacaagtaatatacagttccaaacgtaaataaagcgtaaaatacttacaaaagaggcacttagtcctcgcaccgaaacgaaagcagcagcagcggaaaaaggcgatcctagcggggcttcagctccactccacaggcaaaactcaactggggtctgagccttggtcctctaactccatcttcagctcagaagcactacacttctgaaaaagggggaataatagcaagactgagtacaaccaccgtactcagcaagccacaccaacgatgcagacgtgcaaggggatacaaggaggggtttgtggctatttgcataaaggcagttgtaaaacattttattgagcaaaacagtaaaactgttgagtaattaaagtaacattaaatctccactgatcaacgctacaccacgttgaacaggcccaaccaacccacctgaactacagtgtattgggtcgatttattaagatgggactaatcacggtgaatctggtcgaccgcccataaccgcgggcacggctattcgaatagttttactctgatcagaggtgtacaactgtacccacaagacacagccccatgacacgtttccgtgcgccgacatgccaccacgacataccggaaagaggccgtgacaggacccttcgcataaccccctctaaccaagcacaccacacctcaggtttcacccccactcctcgcaaggcagcgggcagtcccctctcgtgcctaggtgaatccggaagctgcataggccgtcgcagggcccatccaaactccatcacgcccacccttgcctggatgcgtcggctagaggaaagctacactacaagcccagccgttgcccacgctggcttgtggtaagtacgataagttcttccaggacatcccgcgaaccggtccttaactgccatgggtgcgaccaacaaaaaccatgcacccacagcccaccattcagttgcattttagttggataattacgaccatgaagcatggccagatgtctcgagcacgcagctcactctgatactaaaaaggtctaatactgcaattatcccatcgactgagctagtggtaattaagcatggctaagcatatagttctagctaggtcatcaaagtaacacaagctaggcgatttattacccatggttgacaaaggacagatatcaagtaaacatggcacaagcgagcagataggtaaaaccctgacccatgtaattagcaaaatatgcatatttatttgcaaacagtaaaacatttgtaaattaggatcaacatgctcaaggggaatgtgtgacttgcctttcttcttcaaacaatcttccgaactcttatccttgcgaccgcgatcttccgaaacggcgggaactacacgctggcacgcaaaacgaggaaaaactctaataaaaaccaaggaaacagtacataaaaagtaaacaaacatgtagagctcaattttagatgaattttgcaagttgaatggctcaattcggagttcgaatgaattagatatgaattttagaagttttgagcaatttaaatgaatttctagaattaaactcgatttattgcgcaattattatttatttttacaaaggaaatggacctcgctggcgtcagcaaggggcggccggcgccgacacgtgggccccacatgtcagcgagtcaaagggggagggcgcacggtggacatggtccacacgtggcctcgggtgcgcgtccaccacgtggacggcccagatcggcctgagccgatcgggcggccgaggggagcggcagccaggggcacaggcgcggcacgaagccggcccggccgagccaaggcgcggcggcggcatgcggccaccggcggcagcagctggcgacgtggaatggcggcgggcggccggcgaagaggaaaaggaggagggaggcggctcaccgagaggcgcggcgacggaaagagcggccgcggagggagacgacggcggcgattcggcggtctccaatgaaggtggaggagcggccggggtacgggggagcgcggcgaacgcagtagaggcggtggcgtggcttgttggtggctagggcggcggtggcgcgctgttggagtcggcaaagtggcggtggagctcgggttcacggtggaatcggtgcccgggtggtttattgcggaagcggagcggtggacgggatgcggcaaagcgcggcgaggccggcgatgcaagcggcgcggcacggggacggcggtagcggcggcagcggccggctggagtcggcggcttcggtggaaggaggtggtgcgcgtggcgacggtgcttcggaggcggggaggggaaatggagcggacgccggggtgtggcatgacgcggcgaagccgctggtggcggtcgcgcggaacgacggtggtgggagcggctgtggcgaccggctggagggtcgtcggcaagcggcggcgggaggtgcgacggtggcggggtggttttcgtgcacgggagagaggggaaaatggagagggaggtgtggggaatgtttttataggggaggggaggcgggatcgagcccaagagaggtagaaaccggccggcaacgtgggaggagagagagatgcgggaggcggcgacgtggccggattttgcggggagagtggggggggaaacggtgcggacgtgggcgacgaccgcgtccacgcacgcgcgggagagggagtcgcgcgggagaggcggcgacgtgggaggatttggcggccatggcggcggttggggatggagctggaggtaggagaagaagatgacagatggggcctcaggtcccacctgtcggggagaaagaggggaaaacgggcgagggaggtaaagcagacttgagggagagagagagccgagcgggccgagggaggaggccggcccgagagggagagataaggggcgcgcgggccgcgggagagaaaggagggattgggccgaaaggggcccaaagagaggaaggaggatttttttttctttttattttaattgatgcaatgatctttgtgctattaaaactatttctcgagctccgaaaattcacggaaaattccggagagtacattagggcacaaagaatattacaaaatattcccggccaaagatttttttaaaggaaattttaatttcctctataatttcacttgattaaattgatttaacttttaatataatttctagaaatgcattattaattgatttttaatcccgaacgaaaatcggggcgttacatggggtggtcctcttcagagaattctatcttctgttcagaccacttcatcttgggcgcagctccctgccacgtcgaacagacttcgcgttccactttcttgtattctcgctttgaggagtatgccgtggaacctccgaagatgtgcgagacatggagatcggagtctgggtatgctgagtccgattcctgagtagccgcctcagcgtccttctcgaccacgcatactcgcttgcctttttccaatgccatgtgttttgcgagcgactttttgaaaacaaggcaatcttctagagagtgtctgtccgacttgtgtatagggcaccatgttttcttcgtgtcactgccttgtgggtctgggcgcttgggagggtccgcgtattctgttgcgagaacttccgcttgagctttccttttcctacttttacgatttttcttcttgcttgactccggtgcgtccttggctgatttcttctctcctccggtcttcggtttgtcgttcttgcgtctcagtgcgtcgttcgcatgggcgcatcgatcgacaatttcgaataatctccgagtagtcgtgacgcgtctcgttgacaactcatgggtagtatatcgatctctgacaccggacttgaaggcgcggattacagaagcgtcggtgatttcagggattctatttctgcactcattaaagcgccgaacataatccctcaaggattcacccgggttctgtgtcaacgcatgtaggtcgtcttcgatcgcgtggcgcttgtaagttccttggaagttggcgacaaactgctaccacaagtctgcccacgaagaaatcgagtatgggggagatgcatcagccatgaacgcgcagagcccttcaatgcagttggcaagtaattcgccaatgcgttgtcgtccgctccggcagcgtagagtaccgtggagtaaacctggaggaattcttctgggtcgatactcccatcgtacttctctattgctcctggtcggaatctctcaggccattggacatcacgcagcgaacgaccgaaagctctacacccagcgctgggggcggtgggttgtcggcgatcgtacgtccttcgtggatgtctatctgatgatgaggatgaggaagacaacgacgatgacgatgggtcacttggttccggtgtacgattacgaggacgttggccgggttctcgagaatcctgtcgtcgtctcccgttgttgtcccggcgccgattcccatcgccgtcgtcattatggcgatagcctcgaccagtatcgcccagcacccgccgttcgtgatcgtcatgatcgtggcgattgtggcaattatcacggtctcggtcttcgctcgaacggcctcctcgttcttcgttatcgtgacgccgtgaagagacgcgatgtcgggaacggttcttgttgtctcgtgcgcatcgcgcctctcggcggccattcaggtgatcgcggagatcgccggtgccgcgaggtggaggggtggctcgatgaggcgattcctgctgtttagggttttcaccattagcatcgccagttggtggctgttctgggtgcgctgcagcagcggcctcttcgaacgcgttgctgtggttggtcactgattcccgtaaccgttctgtccatcgtgcgagatcgtcgttcagaacgggatcgtaggggatttcccttagtattgcgttgacggccctgatgtgctgggccggtgtagtcacttaattctccgcttccgcattggcgcgcgctgacgtgccagtctcgtcgatggccaatacctcgcgcggcgtactcgttgacgatgagccatagttttcgagcaggtgcaagactgatggttcgtggggatcgatgtcgattacccccaacaaatcgatctgaaatcagtgtcgctccttgttccttgtcctcatccctgagggggatgcgtgactgcgggaccttacgaggtgacgtcttcatggcgctgagaaagaccttgcagcttgagaggtcgtgattctttgtcttgtgaataggaaaatagacaacacgggttgagaagtacgctggattccacgctctttgcaggcacgaatttcagcgtggacgttgagaaaaacccagcaggcttgcaaggtgtgttttctagttttgtggataggacaccaggaccttgtcacctcagaagtcatcctcgtcggctcgtgattcttgtcggaaagacaaggtttggccgcactaggatccttctcgggctcggatgtcgtcgacgttccgttctccgcttcggccggaggatccttcgacatggagtcgtcctgggttgtagccactgcgttctcgcttccggtcattgatggaccggccgagagcggcaccgtgatgtaaaccgggaagacgatttcgccgacttgagtccacaccagcattgttgaagtgggaactcctaggttgaggttggtgttgacgttgttgtcgacgaagctggatgacatagtagtagaaccttgagcaccaagtccccctacctggcacgccactgtcgacgggggatacccgtagaccagatatagagggtattggggtacgctggtacgaggatctacgtaatacgacatccagcaggcagaaaacaaagattatactagttcaggccccttgataggtaatagccctactccagttgatatgggattatatgatggaaaccacagattacaaagggaaagcggaactcaatgataccgccgagatcgtaatcgagaaggtccgattagatctcccggcgacttggctcctgtaggcttcaactccgtaggttgtggtggatgtgttggctatgagattcgatgccttaggtcctcccggggggtcccttttatatcgcaggtcaactggtctccaagtaggactcgaagacatcggactcggcacgatacaatgacgacccagtcttgtccgagtaggactccttccatctgtgaactccatggcgaatttccttaacgtgtaccgaagacgtccgtatatgcgcaagtataccatatcgatatgtgacgtatatcgaagggtagagggtataccttaccctcacttagtttatattatttttctcttctctcattaaatcatatcatatcaattgtttttctaatttttttataatttgatccttttaaaaaacttatccgagaaataatccttttgagataccagagttgctagtgtcgtggtctaacggaacttacaccagcatccttggcgtcgtacccctatcaccatgacacaatgtggcagggggagcgtgcaaatgaacccccccccccaaaacccacccacccacccacagctccatccctccccgagcccgagcgctgcgcttgctcctctctccccactcctcaaatccacttaagatatatcggtaagagactttatgttcttcattgttctttttcttataatctaaaaaaccaaaaaaaaactccctccatttcaaaatataacaacttttcggtagcactaatccgtgcgctacagcgcagaatattagttcgagcgtcgcacaacgcactctccttctggttttcctatttttttaccaccccaccttttctccgtatcccaccttttctcggttcgttttttttgtttttttaccaccccaccttccgtgtttctcttttctctttccatctcattcatgctttatcgataggcccagtaaaatattaacgatccatatttttctgttttcgttctttttatgtagtttttatgttttcgtgttttagtaaactatttaccgtctagtttttctttccgagttttccgtttctctagtatctccgcccatttcaaaagtaacgaatttactctgtggagtttttcatttactcccagccttccacatctgctcattcaaaagtaataaatttactcgcatgaatgcctccacatcggatgacgctatacctaaatgatcgtaaaagaattactaccagcttataacgctaataattcttttaccaatattataaatattgtttatatttcgtggtctgtgagtaaaacaattactaccttcctctcgatatagcccatgatctcgtagccatcgtgtagtaatatgtttactgatgtgttcaatacacagtataagagtataaattgagatttcgtggtctgcgagtaaaacaattaccaccttcctctcgatatagccatgatctcgtagccaccgtgtagtaatatgtttactaatgtgttcaatatacagtataatagtaaaaactggtactaagagtattgttgatctgtctcacaaaatagccgtatgaatgaaaaaattgcaggctcaatcacacaagcgataaaattactcacaggtgaatcaaactagaaaagaaaaaaaatggttcagtcaaaaatctttctggtggcttgctggatcttgctataaggatgaagagagaggtctgtgtcttgtgactggtagtggagagggcaaccaggtggcgagcagtagtcgacgatggaatcatggaaggatgtagcggtgtggtctagagatgagctcgacgctgcgcattagcagccatccatcatctagcaagcaaaaaaaaatgcaaaaacattctcgttcatgtcaatagagataacgagcaaaagaaaaatagcaaacatcctccatcaccggcggattccactctatcctctgtggccagccacatggagcacgatgtgcaaatgtaggacctgtgcagcccatcaattaagatcaggtaatatttgagattgcacgttaatttgatttgcaaaaaaaattagggcttcatgcgtgaagttgaaggaaaatatgcagatgcaaatcatagtatcatttccttacttgcttgttctatcaatgtcgccaatgtggagcagccgttggttgttgctattggcccagatgaacacctccttgctggttaaggtgctgcccagcgtctagcagcgagggctaaagcagtgccatcgcctcaaccgccgccggccaccgccatcaaccgacacggtgtcatcgtcctcctccatggtgtgtcgccgatccgtgggctgggatggtggattgattcagatccgaaaaaaaaggaaaaaaaaatgcagtgggggcgagagtggttggttgggtataggaaaaatagaatatacaccggaagtagagaagttatttttatcgaagtaaatcatttactccgataatggtaggagcacgatgcggaacatggggtgggatcggaagcacggaagttgtttttattatcgaagtaaatcgtttactcgaagaaaggtgggtggtagaggcgcgcgatatgagtagatctttactccgacaacggtaggagtgggatgacgggacatggggtgaggtgggcctaggctaatgtatgtttggcgctcagaataaatagtagttctaacaacttttagccctcagaatttatcctaaaatataaaaaaattaattattgaaggaggtactattttggaaagcttacttaaaaaatacgaaaggtagaggatgagagaagcgagaaacgaacgcacccacgttgctaaacaacctaaaattcttaaattttgctaagggccggtttagatccctaaaaaaaattttacaccctgttacatcgaacgtttgaacacctgcataaagtattaaatataaactaaaaaataactaattacacagattacgactaatttacgagataaatattttaagcctaattacgacatgatttgataatatggtgctacagtaaacatttgctaatgatggattaattagtattaataaattcgtctcgcagtttactgactgattctgtaattagttttttatattagtgcccgaacacctcatgcgacgccctatataatatctgatgtgagacgctaaaactttacactcgtggatataaacaccccctaaatgacatgatagaatctcctgtgtttatggacgggtgcaatactgctctgtttatcagtctgaactctggagcgatgtccgttggcccttcgtgggggccaagagccaaggttttagcatgtagatttgggtcactttatatgatgaccaaaacaaaggattcggatgagttaaagtatcaatacactccctccgaaaaaaaaaaaagcaaacctccgtgccaaagtttaactgtccattttatatgatttttttttataattagtattttcattgttgttagatgataaaacatgattaatactttatgcgtgacttatctttttaatttttttataatttttttaaataaaacggacggtcaaacattggacacgaaaaccaaggtttatctttttttttttgacggagcgagtataatactactccaaaggtgatcagtcaggatgcaggatatcccaatcttgattcttcgggtttgttgtagatttaagtgcccgaggtatcctctttggctgattcctgcattgctctaccgtttgtttaaagatgctcgtaccaggcaatttcaggcaaagaaaattggagggaagaaaaaaatctggacaactcaaactgtgatttgtacttggaaaaattgttcaagaatactattcccgtacgttcaaaaagtactggagttttttttcacaaaaattaggaagaaatgtaaaattgaatagaagattagagaagaaacagtgatgtgattatggagtcgtgggtctatgactccatcaattagggtacaatcctaactatcatgaatatatattcacataattgggcctttaacataaatttagtgagatcataaatgtatcgacgatttccgtctctttgagtgtgctttcaagagaaacttacgagaacaggccctggttttgtctctaaacatatgttaggggacgtattcgtagttatgtgcatgcggtatcgcatgtgtagtgggttcgtgtacgtgtttgtgtcatataatcagaaaaataaataagtgacggattattgagattagttgagatggaaaagtagatagagaaactagataaacatttttttaatggttgaagtaagtatgaaaaaagttgctatatttaaactaaaattttaatactataagttactatattttgaaggggatggagtattacattacatagaaatgcacaaatggtaaaataaaaaccgttattttgtcttgcttgttttcacgttaacctcaacaagataacaaatttcaagatatctcaagaattttgacaaatctaaaacaaaattcgatacaaaccgagcgttctgggggtggttcgagatttcgatatttcgttcgaatatcaatcgaaaatgtgaaacccggttaccgctaatccgccattaggacattcgagttcgattggcgagaccagagattgacccattcggcctccatatcgccatatacttcttccctttcatggaaccagtggaaccagttaaccagagttgcctccggcctgggacgtgcacaatgtatatacggatctcctctcacgttatcactacaatcccttccctttgcgtctttgctgtaactcaatgacatgcatggtgttctttactgattaagacacattttacttgtttttcttagctcgcgttttactgtactaaacggtgtgtttcgtacaacattctatatatattttgctttaaaatatcaaacaaatctatttttcaagttcgtaaaaattaaactcaattaatcatgtagtaacagtgatctttcttgctttacgtatcctaacttttagcttgatcttcgttagaaaagaagacctacagatctaggatgtaccatggccaaagaaaaaggacactaattatcattttgcaggggacgaattcagcgctgacactctgcggaatctacattaggaagcattgtgacactgaatgctccggtttcagtcagcgcacaaggtacaaaggagtaagttgccactctacctgtaaactcaaattgctttgtccagccatcttggaggtctcaatgaaggctttattccgagcttagtcaggaatattgtatacattatatgtagtaggaagataaagaatccacagttgagtagaagctgcaacagaaaacaaagttacaacaagaaaaaaaatggctcgcttaataagcacaatttgtcataacattaccagcgttccaaagagtacataaattgcatccatggaaggaatcgtgttcaccccagctgccgccagaatgtatgtcagggaagcatgtatattgactgttatctgaaattgagcaaaagttactgaacacaaatattatctttccgtcaatcttaatgttgaatagataagtgaagataccaatccaagaatattctctcttatcagaaatgacgacaataaaacgtatccacaagcccctagagcccgggtctgcataacaaaattgacagcttagattaaattctaataaaaaattgacagcttagattaaattctatccacacagtaaaagaataacaaaggcataggtcatgtcagctgaatactacctccctcccaaaatattagggatcctggctgtgtaactggacaaatacttgggacagaggtggtatatcactaggaaaattcccatccagaattggatatagtgccactgtcaaccaaaactacatgtatgtttatttctacttaatgatcctggatcctgatattatttggaccttggattatccccttcctccacaaacacgagctgttgtcacagcagctcttatctgttctctctgttcttacacttgcaaattttctctttgtcaaattagatacgcattaaaaaaacagcgatgtgctgcttcaggacagatggtaaattcaatatgcaaattcattccctggaactaaaaataacacaagattttctgttgccagtaggaatttgcccagtaattttgtgcgaagaactagcaccaagatactatctgttaactgtgccaaaagaggaaagctcttcagaaagatatattggaggtgtgaaatatagaacaagatgtgcatttatataacaaagctttttatctagacagtttgatttagcgtaaatgtatagactaaaattaaattaagtactccctccatcccaaaataagtgaccactttggattcaaaatttgtcccaaaataagtgaccactttagagtagtactagtctcatcaactacttctaattcaaatttcttacaatcttatccccaactaccctctcactcccaaacaacactcatttaataggggccatctaggtcatttacctccccctcataatttggccataagtagtaaagcggtcactttttctgggacagaggaagtaaaagtaaaaataactagcaatttgaccctattttctaaacttcgcttatttgaccccgcttttcaaaaatgaacattagctatgaccctattctatcaagccaacctaacggtgttaacttaggggccaaataccgtttatatccttgctcattttgagtatactctctgagtttttatttatttggttcagttttgtgtactcgttgtatgtgatgaaagttttgacaaatttgacttggaattgacaaattgtgtgtgaatttgagttagatttgatagacttaaggaaatatgactgaattttaactttggaaatatattatccataaaattgcacgctgaagaaaaaaagcatatatgttatttcacgtccaacaattacccaaagcaaatcacgaagctcaaatttgtgtccaccccaaagcaaaaaaaaaaaagtttgaaattagtacatgtaaaacaagagaggttattaaattagatcagcaaaacaagagcaaagcagcttccagatctagtagaacaaggtataaagaggaggtgtgggtagagtgagagaacgagcaaggatgtgggccgcacgagcgcctcacttaggatccacccctctgcgcgcctccgaccgagccaggcaaggactgcacgcctccgtccacacggctgtgcgctccatccacacggcaagcgctggcctgcgcgtttccccatccgcgccgcaccatccgctgctcatccacgcaccgccaccaccgcccctacacgcgctggcgccgctgctcctcctccctccgcgcgtcggcgtcgccgctcctccttccgagcgccagagctggccctccctcccttcctccgcgcggcagcagccagtgccaccagccctccgtgcgtggagccgcccatccctccctccgtgtggcaacagcaggcgccggccccaccgctcctcctaccaccacgcgctggagctgcccctccctccctccttgcggcaacagctggcgcgctactcctccgcgcaccggcgccgccgcccatctgcgcgccggtgctgccccttcctctctccgcgtggcagcagccgccgccgctgctcctccatgcgctggcgccgaccgtcgtccctctcttcgctcgtcagcgccgctgctggcccgctcctggtccctccacgcgccggccagccaataagattcggatgaggttatttatataatcaggggtattttggtcagttcatgcaagtaaatctatttttttctttttctaatggaaaccctaaccacctaacggactagtgaaaacaaggtcagacggtggcttcgattttgaaaaacgaggtcaaatgagcaaacctgaaaatgtatggtcaatttggtagttaggcttcaaaataaggtcgaataagtaattatcccaatcttttaatacgtttatcttgagttgtcaagtacatatccaaagcatatgagatggatgatagattccacatattgggtcaataaaacatctaaagagaaggaaataccagtttagaaaagagaatttacaattgagcagagtatgatggaaacaatccagttggtctccaacctgaggatagaggagaaaaaaaaatgattattcttaaatgcaatgtaacattgagtcattgttgtgaagcaacagttgcatacatgtatgtcatatacacaaacataagttgagatttctagtgaaaagagcccataataaaagaaagtgcctcaatctttgaccttcgcattcctcacctccacatagtacccatggccagacctactactccatgcatgagctgcagaaaacacaagtgcaagggacgagagaatgtgttcagtcaggtaatggattaaagaatgcaaataaaagcctaatttcataaaaaatgcatagtcacttaaatatttgagatctcatagatgataagcaaccctatataaactatatgagtgactcttattgagtacaggcattagttctctcttgttggtgatgacatagctatggatgcatagtagaaagagcatgttacttggattacagtacgcctaaaaacatggattcgaacaagcatatgcacacatgttacaactttttgcatgattatcaagtgttaggttgtagcatgaggttgctggttatcccagcactcagtgtctcagttgttttttcaccggagtttcaaaggtaccacttgtcagctggagggggtgatagagagtagtgacaaataagccatcaccatcaactgttttatttactacggtacaccttggagttatgtgtatctaaagcccaggctggcagcctcacaagccagattcaccttgcacccagagttaaccattttgacatgctgacattctgtagcaatgtagacagtctcaattcctgcacaactgtgcagctgaacccagagctaacttcaaccaacactcttctcttctcgcaatgtgtgacatcatcctaataatttaaatagctacctccaaagtcctagatttgttcaaattatcgtaggtcaaatctagagtctaaaatcgacactagaatgtcaaacatatgtacatcaactaaaacaggacttctaccatgatttaagaacaacaaaggcacgcaagttatgaatcttttatgaaaaatcatatatccttttcagtaccaaacctgtaaatatctttgcgacttttccacagcttttgatctccataatccctgctgtaggcacatattgtctttattggtttcttttcaactcttttttaagctaccgtaaatacatcaaacatgatttgtacttctatctgatgtttgtttgctgatattttgacataacacacaaatttagtttataaatttcccctttttcttctttttacgaagtcccttgttgatggctgataactctaccattgatcaccacagcctgtgaactctactaggaacattgttttcctttagtgacaatcatatgattgtagtccaggaatacaacacttcaatatgtttgaatggagtccacatgacacatacacgattgactgtgacagcctattatttggccatttgcctgtaggagacctggtgctaaatcaggtaacttttaagttgaagcttaactgcatattgatgtagccatgccagtactactatggtcgccttaagagtgtgagagggtgtattgtcaaggagcaaatgaggtagactcaggcacatcaagcaaagtataggaaggctttactgcgaaggggtaaatccatgaattggtacgatgcaagcgcagggaaagaatgactagcccttgacatagcaaagatataggtaatcgtttctaagaattattgattcaagcttgcccatgataacacacaaaagaactgcggcatgccagttcatcgaggatccgttgagagtgccccttgtcagaacaggaaacagtaagtatcgtcttgaaaaagaatgttcttttttctattgtccctattgtttgatccagcggcagagccacctcctaggcaggtcaggtggctggacacatacacgattgactgtgacagcctattatttggccatttgcctgtaggagacctggtgctaaatcaggtaacttttaagttgaagcttaactgcgtattgatgtagctatgccagtactactatggttgccttaagagtgtgagagggtgtattgtcaaggagcaaatgaggtagactcaggcacatcaagcaaagtataggaaggctttactgcgaaggggtaaatccatgaattggtacgatgcaagcgcagggaaagaatgactagcccttgacatagcaaagatataggtaatcgtttctaagaattattgattcaagcttgcccatgataacacacaaaagaactgtggcatgccagttcatcgaggatccgttgagagtgccccttgttagaacaggaaacagtaagtatcgtcttgaaaaagaatgttcttttttctattgtccctattgtttgatccagcggcagagccacctcctaggcaggtcaggtggctgcccgggctccaccgctgccgtctcctctattgatagccattgacacctataaaatttagtcgatcaccggaaaacgctattctaggcttgacgatgcccctggctccaccactagtttgatccttaaacacagggcatcaaatatatcactcttttacttcctccaatacataactacttcaaggtgtaaatatattccactctttgccctagcgctgtcttaatgacagaatcgaaatttccactttgaccttgtaaggcaacaaagtctccatgttaatagtaacatcaatagctgttaatttcaagataaatatgcagtttgataggtttttgaagctttgaagagaaagatggaatcgcctcccactgacgcatgaatcaaaatgcagaatagaggtacttgccagataagttgatgcttttacagggccagacaatgtgaatagcagtaaaacagtagccacctggtgagacaacacaaacagtaagtgtatcagtgattcagaatgtagcaaaaacagaagatactgagactaagtgaactatttgaatggatttaccgcagttttcctgccagcttctagtccccatcttaaggaggagataacaatcggcaatggaaaaaagcagctaaagtaattctgcatcaaacaaaaagagacattagcttatacagattataaataatttggaggcttagaaatttccagtacaagaaggaaaaaatggataatacaccccaatatacttattattgtatttgggtacagaatggcagaaggcagcggacctcgatggcgagggagttgctgaggaagtacgcgaggccagcgacggatgcgaacatcgcgcactcgacaagttgccgcgttctctcgagagcctgtcccaagtcctcttcctcttcatcataatcgtcacccacgcgccgtcgctcggctccaccgacggaggccagacgcggagggtttctagctcgagccgcggcggcggcggatcggaaggaggatttcgggatcgaatagacggccagctggcggcggagatgtgggtgcggtggcggcggcggaaagaggagagggcagggatgaaggcgaagaagcatagccgccatggctatccaaagttacgccccgatcgagtagcatgtgagccctggttcccctcgtgctaccacaggggaggcggcgacggagttgacacctcacagcggcggggatgagggagaagggcgcggggcgacggcggcagcggcggcgcggccggcggcgtggggaagaggaggcagaggacgcgatgctgttttgataaggatcgaacggacggtggcagttcactctccctccctctcgatgataaaagaggaccgtcaccgaagtttttttaaaaaaagaaaaggggaaaaaaaggcaaaaagggaacacgaaatgccactgctgctgctactgtcgccgccgaccgccgcggcggctgggccggcaccggcgccagcgccagcgcccgtcgccgtctcgctgcccccgccttctcggctacgcgcgtcccacctcctcttcgccttccctcgcctgcggaaatacggccgccgggaccgcgagcccgtggcgaccagcttgggcgagttagaggaggaggatgaggatgacgaggaggaggaggaggaggaggaggaagacgatgaggaagtggaggtggaggtggaggttgatgaggatgaatttctgaagaaccggccgaagccggttggattcggcgccgggaagacgtactccaccgacatcgaggagcagcttctccgggagatgggtttgggcggcaggcggcgcagcagcggaagcgggccgacgccggccaagaaccgcgcggcggccaactcggccaagggaacgggtgaaggttagcgcttgttttttttttcttttcatttcccttatctatactttgtatataacccactaactgactaactccttaagctcaacatgcaagtgtgccacatcatcatccactagcaattattatctagagtattttagatctcatgcaaacatgatatatcatttgtaatttagttgtatttttataacttagcacacaagcaatgttaaatcaccatctctgaattatttaaacatatgtctatcatttttataatatataacatacattcatctacatatcccgcagcaaagcacgggatatcaactagtttgtttaggaatcatcaaccataatactactagtaattctctgttgctgcacattacatgaagttcggagattccactatgacttagtatccttagtgaattggaatattggatgcagcgagctagcaaaatacagtacttatgtcagatgaatatccaattatccatttgtgtccttgtgggtactgagtaattcgataaagaaggaattttcgctcaacaatatatcgcaaagaagcaaaaaaaaaaaaaagataaataacattccacaaatccagctgcttatgacttgtcctctgcccagtgcccactcctcaacactttgacgttatctaccaccactaatgcaccggagactcatatagtctctgctcctcagtcgttgtttctttgataatctgcagcagcgtagtagatcaaaaatatcatcgctgcctatctccacaatatttatatagtacatttaggggctgagccaggaattatcaaagcctagggttcagcgagggctcaactgatgggttatttgttttctccaaaattttcatggtgattagaggatctaagcatgattatggaggcaagcctaggactcaaagcttcagctgccctacgcttacctctgcccctgagtacatagttgattagttcttgcaatgtagtatggcagttgagctccattgttatgttatttctctagtttcagtcgttgcagtgttgctaaaagtctatttctcacaagaagatgtcatccttatgtggtgatctatcaacagaatgaaaaaagagaagtaattcattgtgatgcaaatttattcaatttacacatagcatactattttaactgctttactcttttccttaccaaacctgttttctaagatgtttctacattctcacggtgatgtataccatttgaatattctttttgatatctaaacatttgaatgatgaatacagccaaaattatgctgtttatcccataatgatgcaatggtttatacaacagaagtccatttgtcagacatggtatgctgtggaattattttactcaagataaaattcatactagaagaattattagtaaaaatccatgctatcaaccaaacataaattcccccatgatcagtacccctttttcaaagtagaaacatggataaattaaataaagggccaacatgaattttgatagttatttacaggggccaaagacatgggttgaccaaataaacacagtgtgaggtagcaaatgcaattatcctggatggaacaacaaactggtcattcttagaatttagaattcagattgctcagtccctacaaaatacgaacaactggccattcttagaattcagattgctcacttgttcattttcaatgccaatcaattaattctcatggtgtttggttcgaacatgaaccaaattagatgtccctatggtgttaccttcaatagatatgatctttccaaactttttataaataatatcccacttggaagggcaataaacatctgcaagaatttaactaatagaatttcagaaactctcaatacacacgtgttacaatttgtaggtttctttcacacgtcagtagtagatgtctcattagtagatgtctcagctgcctcatgttcttctttggttttaagaaatgattactagacataagcattcctcttgatgaattctctctatgttgccacagatctcaatgatggcggtgtttgtgttcgtgtttggaatctcccaaaaaagaaaaacatacacaaggacctgaatcttgctttcaagggatttccaggccttgtaaatattgagccagcggtttctgcaaacaagaagactcgtgatcctatatgcaagggttttgcctatcttaaactggaatctgtggaggctgctaccaggtaatttattttagtacaaagtacaaactttgctaacttccaacttctatgtataaggaattttcagaattttctattttgctgtgatttatgtataatcaatctggacttaaaattttatatatgtgtatagtaagattagaagtacatgtagatcatttttttggaattttggtggcatatgttggtgtgaccatgagtgcacctgaagcttgtgtgcatatgatatgttgcctatttattatatccatcaaacttacgtttgctttacacaattgcaccaatagaattttgtatcctaccattttctagctcatgtaactcttatggtaaataatatgaccagaagctttagcacagtataattgaagatacagctgcgacttttgaagatcactacaataagagtgctaaaaatgtgtgcgctactgtgcccagggctgttatagagcctcaccggatctttgactataacagaaatttagaatgcttcatgctaccactgccagtagaaaagcaccattaccaatccttcaaaatatctgtcttttgatagtagcgctgtatgtgtctatgccttttatgtcaaagagttctggacttcagtttactctctgaagttggtgtttggatggtaccttactttgatcatccttacaaatatgggctgaggtttactgccgctctagctttgccaatagtaacatgtggaacacatttagctctttgaatacaacatacccaggaccccttgcagttgtctttatattggtatcccctctatccaatcagaaattgctcagcaagttacccagtctggttagtatattgttggtctgcaagacataatgcgtggcgatgctcatgtggggataaaagcccttaggactattcgaggtgtccttgaaccccaaatggcgtgacagcatcatggcggccaccgcaccactagtgtaggcagaagagggagactaaagatttttttttcttgcctaatgaacagagatagaactcaatctttatgtagatcggatgacttgacccttaacacatgatttggccaaataatgaggcaagatctttgattctcacaagctgaattcttgctaaattcctgttattgtattaacaagcccgagtacttctctttcataaactgcaccagcttgtgatatcctttttggcatctaccacttgaccattgtgatgcctgaatggtattcatacgcaagtttgcttttgtttcatattctcaatccagcttagtcgttaatttgtaaatttggcttatgcttgcttcgcatatatattggactttctggaagttgtggtcatttgctttatccgtgtacattcttttatattatttctaagtgttttcatttaggtcatggtagttttattgcttgctttagctgtgaaaaaagacaacttatcagttgtgatatacctttacaatgtatctgtaacacccaacttcagcatgggcccctaatcagcacgattaaatttggacaaagcatactttaaaattgaacttcaaactcaacgtaagtttgttgagtatgaatggtttccctacttatctatggatgtccaaggctgcatgcactatcctacaagctaaatgttcctttaggttggcaccgacatttaacttcataaatgcattggcatccataaatatattgagttgcttctcccatttgaatgtttacattttttcttttttttccttttccttttagttaatcattcgtttgaattttctcgtttttgttacacataatatatatacaatgaatctgaaaatgaaattccataaatagctagactaaaatttgaaaagttcacgttgatttttgtgtcatagtttttcagttgatttattgccccatgttaagctagatacacgtgtgcactttacaccgtaatgtcatattgtacttaatatatgcccatggaatacatgtttgaggcctcctctaggaagcaatatacttgacctgttatctttattgtctttttatatcgttcaggccttcaatcacacagactgcagcatacataacttgatgtgcaaattcttcgtgcttcttcaccgttgttgtgtgtttgctttcagctccttttaaaccaaccttaaacactccatagccactctacggattctgagactgtcaagttcattttccggtcacataatatgtttttcattttctttatttaaaacacaatttacacgagctcagtatctctccaattgttttcagtccaatttgcttttagactagtgccgtggtttctggataaaattccagagaggaccatgcatttgtatccgtcgtgcaacttcttttagccttttactccatatctttatttctacttttatactcaaaacgtttttttattttatatatgcaggtttgttgaactatactcccagaaagctgtgtcattcggcaaggttcagaagccgatcaggtgctgtgttgttgattcacaaagctctgttgactcccaaaatcaaccatccagtggtcaggcaatccgtcaacccgggttgatggccaaaaatttggtggcagcaagctgaatgacaaattgatctgtcagtaacaacctctgagatagagaacttcatgtatatggtgtgctatgaacacattggcaatgtcttgattctttaagtggcttagaaatagcatggaatgataggctaggctctggtcttcttttatttttcttccacatatatacatttcaagaggaagaaccgaagaatacacaaagctcagttacattggcattcctgcttgagcaaagctgtagctagtactggtggtagacgattgatgatttccaggtaagtagcgtagcaaaatgttgagctataccgctgtatgcattgaatttagggagaatccactcagtaccactgagttcgtcaagtttcaataatataccaccgactttgtcaacatccattatataccatcgcctttgctttaacctctacaatttaccatcacagccacaaactgttaagttgcattgagaaaaagacaaatatgcccttaggacgtgtcaagaccaggaacactataaccatgccaaatagggtcctgggagtgataataattgagagagaatgtacaacatgactatacatgtgaaaaatatctcaacatgattagaaataataatgaggacatattataagtatgaataatgtacagcatgtgggcaatacagcatgtgggcaaggaaattcatccataaaaggtgcatagcacaatttgacagtaaggtgcataatatccaatgtccaagtttggcataagcaagttcaacattacaaaagctaaataaataagttaaatggcacagatgttacaagcacatatcccaggatagaaaccacaacatgtaacatcaaattaatttcctcttgcttctagttgacatggatgggctagttgatgtcaatttcttcaatttcttcttacttctagttgacatagatgggctatctggtagtgctgttatggccttatttttccccttggcctttgcttttggtggtggtgtgctcacttctgttactgttacaggaaggagagcacattggttttgtgtttgattagggccacttgaactacaaggaaagaaggtcatgcatatattagaataggcacaacacaatcacaagatggaataggaattaaaaacatttgaactgcatacctcactgatgtagcatttgcatttgcacaagtaattaaattacaactagaactatcaggtgcagctgccctcttctttttgctgcaccaaaacgaagaactaatgatcagatttacgaaattgaagtgaaaaggagtaccatgtgatcatatttaagttatactagttaccttggtgggccaaccaaagttggagttgaagttgaagtgacaatttgtactgtattggcagcacatgtacttgaatttgatggtgttgttttctttctcttttgcctagatcgattgatttgacaacaattataacaaaagtctcttatagcaatgtaatgaatgctgaaatcaaatagaggaaggaaaataccttgtttttgctaaaagagcatatgcttccttagcatctggatcagcttctttgcatgtctgccatctatgaccaaagttgtggcaaatagggcatttttggctacctgacctacccttactagtgcctttcccttcagctccacccttacaccttctattcctaggtctacctgcacttctctttaaaattggtggataaagaaagaagccatgtgtactctctggccattgtgacatgtcagtaagaccaggaatacgtggagcatatgcagctgcaaacttagctacactatagcattcatctacaaaagagtctatatgcaaacccctcactgatgttatgaacgacaatgcgtggatacaaggctttccggaaacttgccattctctgcatgtgcatgttttttcttccaagttcaccacatgcctcttcccacctaagtatacagcccataagtaactataaaagtgcacattttagactaaaacaatgactgaaatactaacctggagatttctcagtgacttcagcttccaaatcatcactcctatcaacatctaagtccagatctcttgatttagcattcaactctctcatcacacttgggagtataatctgtccttgcagcttgttggcaacctttttccttttttgaaacatcttcatagtctttcttctgatcttgtccatcaactcaaataacatcaggcctttgtgcttattgatccagttattaaagctttcagcaagattattggtaacataatcaacctttgaggcagaagagaacttgcttctagaccataacctgaaaggaagatggaattaagtaatgcatgagcagggagcatcaagtaatgcatgaacatatgagaattaagttaccttgggtggtgttgtttcaagtataatattgcttctggcttagcagcctcaatttttcccatgtgataggagtgagactgttctgtccatgcatatgcagctggccacaaatgttcatcaaaaactttgccatggaactttagcttgaagttggtaacaaggtgacgcatacattctcgatgctctacgccctcaaagacctcctcaacagcaaaatcaatccctttgcctgcatctgtgcatattgctaaatcatccatgttaccaatggctaatcgcaatttctccataaaccaaatccaattctcacttgtttctgaatcaatgatgccataagccactgggtatagccaattgtggccatcaattgcacaagctgttgctaattggcctctatatttccctgtcaaatgagtgctgtcgattgccaagtaaggcctacaaccagctctaaacccatgagtgcatggcttgaaagctacaaacattcgtgtgaaccttcgcttctccttgaatgtcatgtggtcaatagatattaaacttcctggacacctcttctcaatttctcccttccacctatatagcttgtcaaagctgctgtcccaatcaccaaacaaccttttacgtgctaattcttgaccagtccacactctcttgtagttgacatttatcttgtggtgttcttttatcctccttactaactcggcggttccaacacttgggtcttccctcatccattcaatcaccctctcacatatccatgccttggatgccctcttcaacttctcatctcttctagtgcttgcacactcatggtcagccacatgaaccttgacctacacatggatatacaaaaaagaaataaaagtcaggtgcaattatatagaagatatcatcacacaaaaaaaacataagaccatctaggttacctcaattgatttcttatcagccgagcgtgatgcatggattctccaattacaccctttcacaggacaatgcgctctgaatcgattaggttcacttttctcaattgcatattcaaattcatgcttaattgaatattgagctattgccaatcgaaactcttcaatagaagggtaaatagtacccttactcattggtgggtcatttttatcataagttatgataggggtactttcatcaggtgtggcatttgctgtgacccagtcatcatcatcatcagagctatcatcaccatcatcctcctcatcctcatcaaccccaggcacatattcagaatcagatgtattgctttcattattatcagactctggagtatcactaccaattgagtattgatcctcctcatcaacacctacatgctcaaaatgttcaaagggattggccagatacatgtccaccatgttatctgccaaattaccatcctctaatggttcattgctgatctgagaaatacatgcctgagaggggataggaactgatggtgtacacagcttgccaatgatggactcatcacttgaaccattaattgtgataaacacatcaccagttttattttgctcaaaacacttaaacattgtcatcaaatcattatcagaatatattgtgcaaaacagattcaaaccactatcaaggtactgcactgttacagtttcatctatgccccatggatacttctcacaaatgtcatcaacaaagtctttaaaattagtggtgtcggaatcaattgtccaatcaaacacccatgcaccctcaaatctactgcccgcgcgaataattctcaccgtgagaacataagtggaatatggatccatcctgtggatccacacattggaaataaacttaacaaccaaaaccagaaatgcacaaatatacaagtctaggaaccagaaatgcacaacatacaagtttaggagaggggaaattacccatcttggatgccaatggagggagcaacaacggcaatcggcaccgggacgacttcctttgacgacgatggcggcagcataggggcatcttctcccatcggcagcataggggcatcttctcccatcggcagcacatgggcattttctcccatcggcagcacctcattcgacgatgacgacggcgctgacgacgacggcaccaccagcagcagcggcacaagggatggaggcgccgtggccggcggttgtggaggcgctggggccggtggtcggggcggcaccggggacggctgtcgcattggggatgacgatagggagggaggcggctctcccgttggagtagggccgcccatagcggcgagagggtcgggtggcagccggggggagagggggcgaagatgcaacggggaggtgggcggaggtgcggcgcggcggcgggcagagatgcggcggcgggcggagatgcggcgcggaggttgcgtggcggcactggtgctagcgctaggaagggatggaagagaggattgactgggcgctggagaggattgactggttagggttagatgactcaaagggcatttcggtcattacgaaaaaatataacagtacaaacggagtatagctaacggactgtggacggcgatggtaaattgtagaggttaaagcaaaggcgatggtatataatggatgttgacaaagtcggtggtatattattgaaacttgacgaactcagtggtactgagtggattctctcttgaatttaactctttcgtcgccatgctatttttccttttctttatttttaaagctatcgccaaacctatttctataaattgatcatttgggcactcaattgtttctagaccagaaagtgtttcttggaattcttcctctagggctagaattttatacatttgttgaacctttttaatatatatatatatatatatatatatatatatatatatatatatatatatatatataatctaccttgtaattcaataaatggttttactcattcatcattcatcatatcacaccaacgatccaaattattcctatgacttagatccgacggctccctcccatccatctctcgccgaaaacagcgccgatcccctccccccgctcctatcctctcgcagaaaacaacgccgtccgccatcgccgcccatcgctctccaccgcgtcgccgtgcctccgccctccctctttcaggtcgccgacccaacatcaggtcgccgccctcgccgatttgttccattccctcgcgattcccaaccctaacctccgccgccccgcaggtcaccgtcgctcacggcgcgcttgcctcgcaggtcgtcgtcgctccgccgccacccggtccccatcgaccgtcgcccacggcgcctccacaccatccccgcatctccgtccgcatcgcctccctcagcactcggccctcgcacatccccgcgctctgcggctccgtatcgccgccctcgccgcatctccctcatattctggttttgttcactgccgccgccttgcaagtcgctgtcaatccgccgccattcagtcttcatcgtcgagtccccttcgccgcgcacatccgtcgttggagcgagcatcatcgtcagaatgatgtcttcaaccatcctccctccactgccgtcgcatcagtgccacgtctagccgccttcgcaagtcgctgtcgatccgccgccattcagtgttcgttgccaagtccaactgcgtcgccgctgtcaccatcttcaccttcaccttcactgacctctcctctcaggtttgattgctcgaacctgaggaattgtattctttctcacttctttgcacggaaggcttgtttttgtgcagctggattgctggacattaatcctgtttgaggcctgcactgtggatatagccatgtaactgtaaatgaatctaaaagcggcatgacgtacgagacctgaaaccattttttcccatagaaaagctacccataatatacttatgccctctcctttacataactggaatatatagaaagcatgggaatgcatatatttgtcaaatttactatctgatgctctctaggtttaacatgaataatgttatttggtactccaaagcagcaaaaaaaaaaatcaatagaaggtagatggatatgcatataggacactagaacagagggaaattggcacatgatacaatcaggtagccactgctcttttctacttaactaaattttgtggttatgcaaaggcataatatgcccatacgtccatggatttaggagtataacctctactgccaacaattatgctaggttcctataccttctcactcggtcgccagtaaaaatccataaattttttccctctctgttattgcctggaggctggaactcaccacagatcgctttctcatgttagcaccctttgttattatttttagaatgtgtgcatttctccagttttgttaatatacacatttttctcagcttgtgtgtgggcattcagttccatgtaaagacctgatgtgctgaactgctgattgccaacaaaattttgcctgcacttgtacagaattgttgtttttctttccgtgatgctcatatttgtatttgaaaataggggacatctgaacggtaagcgttttgacatattgcaattttgtgcacaatgcaggaggatgcagcaactgcattaaaaagaagaccttatgctaacaaagccaaaggaacctgagtttcagacctcccacagggtccgtgcagtcaagagtgaaaagctctgctgagctagaggaggagatgctggccaacatcccaaaattcagagcacggccatttaacaaaaaagtgagaattcgtttaccttagtttgatcgttactaactgctcaatccaggatctgaagactattaactaaatgtttgcttctgcattttgcttcagaacataaagtctgaacatcgtttcttgcagattcttgagatattgacactggccatttctagagagtagggaaggaagaaatgagtagtgatcacaagcaacagctattgacattacaccattggcatcatttcttttcatggggaaaatcatcaaaagatgccttagaacagaacagaaactaaatattccagatattttatccatattttcacctatccttgtctttgcctttccagtgctatttttctggtaccaaaagatctctggtgctatattctttttatttgtaaaattattagatgcctcattctaatatgaagatcattcacatcttaatcatactgcagaggatatcatcaagaatttgtgaatggcttatcttcctttctccatttcccatttattgcacattgcatcatcacatctttttgttatgtataatcatgtggtagttgattttgctctgattgatttttgtacaggtttttgccatttcacctgacggataaagacaatggctatttatctttaacaatagatatcatagactgcaaaattatttctacgcttggctgaaaggaggacacctcactgcaggtatgtccatacactatacatttatatgaatcaacacaatttaatgtttgcttgtgtcacaaaaacaaaatatttctctgatttaatttgagaatgcatcttacaacaatttagctggctttcgagcttcttaacctgatgcattcatatgtgatgctcctgaggaatcctaatatgtttcttgttttcaactgtttgatgagatagttaattctataactgaataatcttctcaatgcctattcaggacaatgtgtatttactaatgacctatttcttatttatgtacctttatgcacatgttgtttcctaattcagattattatagatcctattgtttcctgtcaaaaatttatagcaatctagctcctatgagtttccatatacatgttataagaatgcaccctgtaatatttatgggatctagaattcaagaattacatacacaaaatatcctttcaatctagctaattatctgcatggtgctgctgatattactagctcacttggatatgccacacattagtccattcatgctacacatgcacggatcaacaatatgcaatggtttgagttcacctcttgtatctgtaattcattttcttatctagataatatatggcgtttaggcaggaatgtacatataagtcatagttatggctatgtgagggattcactggatttgtgttcaacccttaagacatgtcaggcatgttaggcttaagacattacgatttttaatttctattttttggtacaagaatctccatgtgaatttaggtgtatgcctgtttgtcagcatctatgatattttatttaagttgtaaaatctgctcgtgtaagttttgtccatattcagccaatacagtaagtgaaccacccagattgccttatgtttggtttgatctcttctcccttacccttcactgtgtgatatatttttgtcctgtattgatatataagtgatgtgtgaaccaatttagatttttgttatttgattactggtatgatatgatgcaattggttgaactattttgtcatgtgcggaaacctgaggaggatttgttggtctgtattttatacatgcttataaaatttaattgtgaattgagattgtaaatatggtctgtattatattagatggatgaaatatggtggtctagggaaaaaagaagctacagttagctaaaattgactgaattcagattgcacatcaataatgaatgtgataattgaatgtcaatgtgaaaatttgagagtccagatagtaactgggtcaatttattgataccaatttagtatggcaacagaggttgagagttcgagactgcagtactgggagatgcttggacagtcagcattgatcattataatgtgatgatgatgcttcacagaatatgtgatggctgatttatacatatttggtcctataatttaattgtccaattatatatagtttgagacggcaagatggcaaaataaagctacaaattatgtacatcgttaagtgctgtccttttgagagcaaaattgaacacgtactagggtttcccaaaccaaaaaaaaccaagttcttgcttgctcacaacctcgctgggctcagaacatccgatattatttattttcgaaaaagtccaatttaggtcctacccattaaaaccagcgtaaatcgagtttctcgatgattttttatgacggtttcatcttatgaggcgtgtttgacttagtgttcaattgacgtggtacttacgtataattatagtcagtgaaaatatataataggacccacatgtcaatgctaattgcaccttaaaaattaaaataatttatggggacctatatgccagtcaaatgaaaagaaaaaaaaaatctgccaaccttaccttgtcccccaatcttgtcgctcgcctattgttttgccgctcgatgtcccgatcgtggccactagaaaccgccgcttgccaccatcattaatagttgaagattgcggctgattctggacaccaatggttgttgtaaccattgttgccaaggttatagttgccggatttggaatcgcaagaccgcaatgaggccaaatctggtggatctgatggcaaaatgatttgccttactccttcctagaatcacaggttcactacctagcaccaatgacagttgtcggttggagcttggagctcgatgcctcgtgaaatctctgccttgcccttggaattttttacgtgtcgctgcctttagctcccactgccgcatatagcttccagatgtgaaatagagaaatcaaaatggagaactgataacagcggcgcgttgttgttggagaagtactacatgtactttgttgaggccttgtgggagaaagcggttgtcggatgcgattgaagctcgactctaatatgagacacttcaacttttaagtaggttagattaaacaaatatcatggcaccgtaacgtaacgttagtacgaacatattactagtatattaaaataaacttttgttaagtcatttctaaaactgaaccctccccccaccctcggaaaacactaattagcgcgcgactggacacgtgtcgtgcgtagagaggagcggtagacggcgcgtgtacgtatggttttcctttttttttctgttttcttctgcggacgcgtgtgtacggtctccttttttcgttttttctgttttcttccgtattttcggtttcttctttttcttttcgtatctttttcagtttttaatacatacgtatgcaaactttatatacgtgcaaaatataaactttgtatatacatatataaacttttatatacgtgtatacaaactttatatacatgtatttttttagatttttgtatgtacgtatacaaagtttgtatacgtggtgttttttgttttttcttggtttttggttttttaaatatgtatgtatttacgtatacaaagttcgtatacgcgtacacaaagtttgtatacaacagtgtagtagtactacttgtagtagtagaggtagtaggtagtactagtagtatactgtagcacaagagaggtgactgcgcgggcggctgggcgcgcgccctgtcgcccattagcagccccccccttcctgatctttctctctatgccctcttggttgagcaatatagcttggtgagttgagggagcgggcggccacctcaccctctcctcccttcttccggcgagcaaagggcacatgcatcaaagagcggagaggcccacggatgacacctccatatgttctagttgttatcacaagctccttcccaatcctcaccgctgttgttgagaaaggtggcagtggaggcatgtctccaccacgaaagcccaacgagatatcgccagctctacatttcccctgttgtaacctgatattagctcgacgccaccacttttttttattaagcaggtgactagattgccacccatgcgccatgtagtataaaaactattctcaattgggttgggggtagggatgaaaacggagcagatagttttcgttcgctttggagaaaaacgaatacggatacttttcgaatcggataattctcagatagttcatatactgatacggatacggatattttctctcggatacaaatacgaatatggtatcggggtttctgtcggatacgtataataattcggatatctggtgaacaatgttattcggatatccacaagagtcatgagacatgccatatttatttataattctatgaccttcaaaataactttctagattttaatagtagttcatctcttaacactagtccacactattaatattatttaatttttcaaaaatatttataaattatactacattttatataaaatgagctaattatatatgttgatatatgtttctatttgaagttgagttggttttcgtgtttcaagaaaaaaatatttccgtattcgtgtccaatcatatttgattcttattcgtatttaagatagtccgtatttgtttcagtatccagcaaaaaaaaatgaaaacaaatatggtatgagcattattcgtccgtatccgctccattttcatccctagtcgagaggtgggggggggggggtaattcatctattgcaagggaatagaatgtccgatataagagttgagggggataattcatacttttgtgataatttatgggggtaaatcggacttaatccaaattagaatgatttctaagtttgtgaatgaagggcaaaaaaattcctaccaaaattttgaatcacaaaaaatttagcatggtaacaatatgaaccttgcataaaatagcttccactaccgagacttggtaatggtatattctcgctctcataaaagttagacaaaggtagtaaaccaaattcattttacacatcttaatcttaccaagtgttggcaatgttaaatttagaactgtaaaatttggtagggttgattttggcattccaaataaaagaagaaatcaagtcaagggaatctaaagcaaaacaaaaatcgcccgaaaggataaaaaccaatttttgtacaaaaaagagaattgaattatggaacagcacagagtaaacaagactactgcaaggagttctctcagatccaagcccgtgcaagacaccaaaccagatctcaccatcccccctaccccctctctctcagatcccaattgccaaatgccctcgtagtcgtagctgcacgccgccgcgtagtctctcccaccccgcgcgcccagatccatgggcggcctgagggcagcgtcgccgtcgtcgggcgcaggcgcaggcgccggggcgggatcggatcccacgccgcgcgtggcgatggcgtgcgtgctggcgtcggaggtcgccacggtgctcgccatcatgcgccgcaacgtccgctgggccggcgtccgctacggcggcgacgacggcgcggacgacgagcacctcgaccacccgctcatcgcggggctcaagtccctgcgccgccgcgccgcctcgtgggacacgcgccagtggcgggacgtcgagccgctcctctacctccgccccttcctcgacgtcgtccgctccgacgagaccggcgcgcctatcacgggcgccgcgctctcgtccttgcacaagatactcacgctcgacctcgtcggccccgacgcgcccaacgtcgccgaggccatgggcgccgtcgtggaggccgtcacggggtgccgcttcgaggtcactgacccggcgtccgaggagacggtgctggctcgggtcctccaagtgcttctcgcgtgcgtgcgtggccgcgctgcgccagctctggccaaccgccatgtctgcaacatcgtcagcacttgcttccgcgtcgtgcagcaagccggcactaagggggagctgctgcagcgcgtctcccgccagaccatgcaggaggttatccgctgtgtcttcgctcgcctgcctgatgttgatgccaccgtggttgccgacgggcaggtgtgattccttcctgtaaagatttcgaaccttagttacttgtgcgttggaaacatgatgagaaatgctgcgattgtcttccactaaacatgataaatttaacttgcaatgctcatctaggtgagtttaaagaaatgtatattatgtgaattttttttgttaaagatgttcatggtatattgtctcgctagttcaaatagctgccattctaaatttaacttgcatcacattagttctggaaagagcatgttgcagtaagaaggctcattcatatatccctgtactaagttaaatgcattaatactggtgatagcatttttctgcagactgcttgtagcaagaaccaaggtttgagtgatggagagatagggaacgggaagagtgattttgtgtgcttgaatagctctggagatgaggtgggaggtggatttggtgttgttcaagaccaggctatgagtgagctgtttggggttccttgcatggtagagatattgcaattcttgtgctcccttttgaacatagcagaagacattgaggtgaatccaaggattaatccaattgactttgatgaggatgtgccactatttgccctcgggttgattagttctgctattgagttgtcagcttcatccataaacaaacaccccgaattgctggcatttgtacaagatgaactgttccgcaatctaatgcaatttggcttgtcaatgagccctttgattctgtcaaccgtgtgcagcattgtttttactctcttctaccatttgcgtcaggaacttaagctacaacttgaggctttcttctcatgtgttatcataagacttgggcagagtagatatggtgctagttatcagcaacaggaagttgctctggaggctctagtggatttctgtcggcagaaagagtttatggcggagatgtatgcgaatatggattgtgatttacagtccagtaatatttttgaagaccttgctaaccttctgtctaaaagtgcatttcctgtgaaaagtcctttgtccaccctgaatgtgcttgctctagatggtttggttttggtcattcaggcaatagcagagaggactgataatgcacctcagcatcatgaacaaacagtgcctgaaataagtgaatattttcctttttggcagttgaaatgtgagaacactaatgatcctgatcaatgggttagatttgttcaccagcaaaagagcatcaagagaaagctaatggttggtgttgaacatttcaacagggacaaaaagaagggctttgagtacctgcaaggggctcatctcctgcctgaaagacttgatccacgcagtgtggcgttgtttttccggtacacacctgggttagataagaatcttcttggggactacctgggaaatcatgatgagttttccattctggtccttcatgagtttgctaaaacctttgacttcaaggagatgaatttggatgctgccttaaggctcttcttggaaacttttcggctgcctggtgagtcacagaagatacaaaggattcttgaggccttttctgagagatattatgaacaatcaccacaaatgtttgttaaccgggatgctgctctggtgttgtcatattcagtaatcatgctcaacacagatcagcacaatataagggttaagaagaagatgacggaagaagactttattaagaacaatcgccgtatcaatggtgggaacgatcttccaagggaattcttgtcggaattgtattattctatttgtcggaatgaaatcagaaccattccggagcaaggagctggatgctctgagatgtctttcagccggtgggttgatctgatgtggaagtcaaagaggacatcagcatacattgcttgtgactccttcccttttcttgatcatgacatgtttactatcatggctggaccaacggttgctgctatctcagtggtttttgataatgttgagcatgaagagttccttacaggatgcattaatggttttctatcagtggcgaagttggcggcattctatcatcttgatgatgtgttgaatgatcttgttgtggcactatgtaagttcaccaccttgctgaacacttcctatattaatgatcctgtaacaactttcggtgaggacaccaaggctagaatggcaaccgaggctgtttttactatagcaactactcatggtgatcacatacgcagtgggtggaggaacatagtagattgcattttaagattgcataaaataagcctacttcctggttgcctcaccggtgacacagctgatgatcaggagtcctcatcagatatgttgcctagcaagcttgcctcatctcgagctgcacctcaagttgtgccaatcagcactcctaaaaaatcatatgggctcatggggaggtttagtcagctattgtatttagatgctgaagaatctaggttccagccaactgaggagcaacttgctgctcagaggaatgcttcagagaccataaagaagtgccaaataggtaccatcttcactgagagcaaattcttacaagctgactctctcttaaatctggcaagagccctcacccaggcggcaggtcgaccacaaaggatcaccagctcacttgatgatgaaagcacatcagtcttttgcttagagcttctaattactgtcactttaaacaacagagacaggattgtccttttgtggcagggtgtttttgagcacataactcatattgttcagtctacagtgatgccctgtaatctggtggagaaggctgtttttgggctgctgcacatctgtcagcgcttgcttccttataaggagaatcttgtggatgatttactgaggtctcttcagttaattttgaagctcgatgctcgtgtggctgatgcttattgtgagaacattacccaggaggttacgcgcctggttaagggcaatgcaactcatataaagtcccagatgggttggcgaactatcatttcattactctgcatcactgctcgtcatccagatgcttctgatgttggttttgaagccctagtttttatcatgtctgagggagcacacctctcccctgctaactttgtcctttctgtggaggcctcaaggcagtttgcagagtctcggcttggctctgcagaaagatctatccatgctttgaaccttatggcagaatcagtgaattgtcttacacgctggtcacgtgaggttaaggaagctggtggggaggctgacaggatattggaaggaattgctgagatgtggctgcgactagtgcaggcactacggaaggtgtgcacagaccagagggaggaagtaaggaatcatgcgctattatcattgcacagatgcttagtagttgatgggatatcagtgccatcttcagcatggttgatgtcatttgatattattttccagttgcttgatgaattactggagattgcacaaaattactcaccgaaggatttcagaaacatggaggtgtccctcttgcatgctgtaaaacttctatgcaaagtgttcttgcagtcacttaatgacatttcatcacagagcagcttcagtaagctgtggttggaagtacttgacatgatagagaagcttatgaaagtcaaagtgagagggaggaggactgagaagctacaagaggttatcccagagctactgaagaacatactgctggtgctaaaagcaaatcgggttttatcaaagacaagcaccagtgaagagaacagtttgtgggaagcaacatggcttcaagttaacaagattgcaccttcactgcagccagaagtttttcctgacagtgagggtgatgtagcaacacaaagtgcaaaaaacaagtcagatagtccagcacaatctgaaggcgtgaatgtttagctcaacataataactccagtaaattggttatattatgccagaacttcctaaaatttgaaatgtggatgtatattgtgtccttacattctttagctgccactctttgagaaacaaaacatacaacttccgtgcatgtgtaatttccattgatctaaatggtgaaattaaacattagaatgtgataccattagcttgttcttctgggatatgtggtagtggttttcctgttgctttatatacatatgttatgaaccatttgtttaaaatttccctagtttttctgggacatgtgtacaatagcagtcagtagaaagtgactgaaaaaaatgataatgaaacaagtttgctttagatggttgtgatgcactacaatttacaattcaatgttgcttattgtcattaggtacagttattgtttatttgctagtggtacaccgttacttttcctattatatttatgagtatcatacttggtaccatttgcaaaaatctcagagttgaaaaatgccatcatgtgtcattgacatgcggatccgcatgtcattctcacatatgatgatagtttgcaactcatgtatctctacaatggtatttttcaaactttctcatacagtataccacctgttatgctgtcatgtgtcgtgaaagctgttaacttacataaaagttgaggaaactgcaaaacgggtagcatttcttgtttggaaagatgattccactggtgcctgtctgcctgattggaaagttaaagattaccagagtggagaacgtgcaccaatattacatcatatgctgtactgcctggccttattcctttctaattagaatatacattattggaaatgcattcaaaaccacatataaagcaagggcattatttcctacattggagagggaacaagctgctggaccatgaacatgaaggcctacttatagtggcagactggtggtatattatagtgaaggtgaaatacattaattgtttatcattatcaaattattaataataaacaaagcaacaaaaaactatatatctcatatttgctatctttatagcccatgttgaaattatcttattttcaggattgcgggtgcctagaaaccggaggcagctgcatttttatcaattcctggacaatttgagggaagattgaaagtatttccttctggagatggggcacaaaatttactgattatgctggtacgtgtggtttttttgatgtactgacatttattttgagttatagcattctatttgttgtctcaggtagtcaagtttacactattgaagggacttataataccaggagtttctatagtgctcaattgctaaatgtgttaccatttgctcaggtgtcataaaaacactccagtattccaaggcaaccatttcatgcggtttgatccgtttcccatagcccaatcaaaatatgccttaacatttggacctaaggtcttagcacctagggatatcactaatctggctattcttgttgctgtctttggtaactataaaaaaatgagtaaattgcacattggtctagttatatttaccaaagttctagtttggaccatcctatagacaatgttttcactttaggctaggtcttacagcaaaaaaattcagtttggaccggtggctcacttgtcagcgagattaggagataaatgggcaagctgggagcctcctctctccttccaactctggagcgcagcttctccaccgtttgctatgccctgcccctaattcaactggatatgtcaatcacacgcaaaacgaacttcatgtcaatcccatgctagagctggggaagaagaacaagcacttgtcccctaatgttgtttcattgaccttgattctgccaccgtcagcttcatggccatggccgtcgtccccaactctaacgcctttccttccaataaccactccgccactcacttcgccgccgcgcttaatctctatcctctagccaatctcgtcagccccttgagctactggacagcaagggaaaacaacaacagagcagtgcctgctgcatcgcccttctccttggctaacccccatcgcgtccccttgcgctcaactcccgaccagcgacagaagtggcggcggtgaggttgcgcatgcccttgtgggagggagaagatgtctgctcatccagatgggctcaaatcctggagcctagcccaaagtgcaactcttggcaaatatatatggtgttaagtgaaaattttgacctaaccctagcccaatgtaaaacattggtaagaaaaggcagaccattgtgaaatttactcttataaaattgatgagagttccatcatattttccttttccaaaaccccgtaaaaaaatagattaagctgtataacttcaagaggtgctgttagtgctttctagcgtcaactcatcaatttcttgctctacaagaccactggtgttcaggtgacacatgtgccacctgttcggtataatgcctcaattaacaataaacttgctggcatttctctataaaatattccatgagtagatcctccaccacctacctgcttgttgagaaggtcaggttgattgatttatccctcctttaatataaatcattttctggttaatgatggagtatataatttcctcagattttaaaaatcatctctgtgcctctaactgccactgtggacatttcttatctgactgcaactatttatgcatcataatcaatattttggttttatccatgctatttattatactggattgctagttttggtaaagcatcctttgccaatttattccagtttctgttactcttgcaccaatgggattgccaagtctaagttttgcatatttcagtaatccatcctattatatactcatttagtgattgtaatgtgtactttgattagtatgctacagaactcagaagaacaatgttacaccattgcacttttcgggttcagatttctcttatcatactgtttgttttactgcattttgctgggcagtatttatgcatgtacgtggtacaacatggttgttacataaatgataattgataagcatatctgcagccacaagtttaccttttttatattgagcatatatttggcaaagattcttcaggttgacctggtagccaatttctagctgttgccgagtgggatattttgttaaccagttgcttttcctttctatttcctttcccacttgtgtattcaagctctgagcctatgaaaatgagctattctcaaaactttggtgagaaaaatgttcaatatcactttgctggatatgtgggcactttggtagagttttacattctttttgttgaggagaagttattactgcaacatctatttcttgagtcctattgctactatgtctctttcatggtttggcataaccacacaatgttatttgcgcagacccttttcaggggttgtttcgtatgcctctaaaacaggccataacagagttcttggagatacaaggtaagtgtgcaatgcaaaaagctctcttgaacaataaggtattccctttgtcccaaaatataagcatttctagttgtcctaagtcaaactatcctaacttagatggtttgaccaattttatagagaagactattaataactaccatgtcaaataagtaaactatgaaaatataatttataatggatctaatgatactcattttatgtcatattttgtcatgttattattgtttttctataaacttcgtgaaacttaggatagtctgacttaggacaaaaccaaaaatgcttatattttgggaaggagggagcaagtgtcagttccactaccttatgtctgcttcttttatttcttctttttttttttttttttttttttgtggagaagctatctctcacttgagaccttgtttggataggctgaaatcctgagttcctgacctatccatgtgtatgggcccgggattttagttcaaaatcctggcgcatactcatggatgggccagtattgagccccatccaaacaagacctgaaagttggtattaacaattgaattaatattgcttttgtcctttcagtgaaaggtagagctcctgcaacttttcctcaaaaagagaaaaaaatctgtcttcatataatctttactagtaatttgaacttattcagtttagttattgtaggcttttgccgtttccagtgacacaggaactgagcacaaccggtgcgtataaaagggtatgtgccttacttacattacagattgtgctactttcaattgtcgcgcttcgacaggcatgacttggagggtgtgtgcgtgcttgcatccatcgttgttaagtcataaagttgagagtttcccctctatcaacttgggagacgagttgctgagttaactggtctatcagactattacagtattagtacatataccagttgcttctactgctagtcagctcatctcccttatactcagtaataatgggcctggtagaccaggcctcccaaccaaggccaatttgctccctagtgatggatcgttgctactttgctggtcttactccactgcttctgctgccaattagtccagtctgttccctggccaacttgcacttgcatgacttgataacagcacttgcgtcacagaatgtgataccgtataacctgaacaagactaataatgctcaatgagcacacagtatgggtccatttaaatatcgatttcatcgaagggaattatatactatgacctttggatatatataatccgatgcacacaagcttgagatgtagagttaaatgactttgggagagtttggtatcagtgacatcttatcccaggcatgtattagctaaattccttttttctttatagggggttgtcatcaacaacggtacctaactagttgtgattattaaattgctacttgtgtggctagcacatatttatgtagttctcaaacaagagataatgatgatttcatttacattgcttacaaaactttgattatgaattattctaatgaatctttgttctttaatttggttttgtatcaagttgttgccaatttttgcatgtatgaattacccttgtaaaattattccatcgcttaatagtttccactgctaaggaggctgacagtttcactttccatgtcttctattagtcagcatgaagaaatttgcaatattttgcatcccatttcttgattgctacacctcccatgttgctgagaatctcggggagcctattctcttgaatggtcctaacggtttctaccaagcagaatgtggggctagtttggtttttgacctaaattggccttgccaatatttggcaattttaacagtatttagtatatattttgatttgaagccaaattttagcatgcctaaagaaataggccatttcaatagtgaaattatgttgttttggcttcaatccaaacacaactttaccttgccaagattagctatgccaaaatttaccaaaatttaacattgacaaaaattggtaaggtctatttaggtcacaaagcaaaccagcccgtgaggcaactaagataaaatgtagtttacctcggaggccaatgataattacatccttgggtgttgcaacaggtataagagcagatacaatagcagactataagccagctataaacacatttcaacgagataaaagaggagagagaagggcagttggctacagatttgtagccagctgcatcatggacttcaaggtgcatatgtgtatgacaggtgagacaagattttaattatgcagtatatgtttataggtaaatattatatgaattggttattaagttgactatagatgacctggagctagtagttggctatactattaaacttgctctaattatcatatgtggaagtcctcactgtaagccttcctaatctcagcaactagaacttattaaagtacttgaagtacacaaaggccgtcgccatacttccgctcgttccccgtcaacgccccagccgccaggtattggaggtggtagaaaggccccgccgtccttgctgccatccggctttgtcggtgggtgttggagggggtagaaaggccctgtcgtccttgctgccatacggctttgccgacggctgctcgggcggcagcgaggcggaggcggggctacttcgagtcaccgctcatgttgccctagagcagagggacatcgggctgcaagtggtatctgtttaatatacgatgtttttttgatagtgccacatatatgagcttctattttctacttctatggaaacatattttcttttaagacccatcggtggaccacatatgattatgtactaaaacaacttattagttaaaaacaaataatttatagttaaaaacttttatatattttctttagcgttctaaaagcaaatgttggtgagataccctaaaattagttctaaagttttaaaattaaaattttggtagcggcggattttttaaggcaaacgatgaggctctttattttgagtaaagcatttttcatgtgcactgttggatgttgatcggacggctgacacacaagccgtcccaaataaagatctctcaaaccccacatcccgacaaccacaggtattttcctccattctcttttccatcaagtgaaaaagaaattctagaggcaaacggcaacattgtgttacatcagattacgccatgagcccatgacaaagccgcggccaattgggcaaagctagtcgttgtatcgtcgtccacatgacatgaaccccaaagctaagccaaagcccacaggagtcgcgctagactggtccactggtgacgtgagacggaggttttccctccgactgccgctttcccttgcacaggccgggccccacgagcgcccgcgcgcggcgcgccattggtccgcccgccgataaggcgggtccgtgccgcgcggccgccgtcgctctcctacagcgaggcgctgccgctgcggcagccacagtttcatcggttcgcaatgtacaaagcagctgaggagcgaggagggggccggaccaccggatggccaccacaccacttgcttcctccagctttcgctgccttctgctgctgctagctaggcgtgcgtacgactgttgcacaaagcagctagcgccctctgctgtaaagctgcaggctggtacgtaagtgttccatgcaggctggtacgtaagtgttccgtgcatgaattcgacctttgatttttcagagaacgacgattgcgcatcgatctggcttgtgtgcttaattgctgcttcctggtttcttctctctctcatcaattagttgcggcatgcgcatgtgatttgtttctgctttgttctgacttctgaggagcatacgctgggtagtttatcgatcctacttctgtattttatcgcattaaactcgatcgaatattcaactgcaccagtgcattgatgtatccaattatcaatttttgaccattgactctacaaagttctttttaactatcaaccccacaactgaacgtggtttcaataaataaattcataggttgcaacaagtttctgttatgttactactcatccttgctctagatatttgtgtggttgtaaatatataggcatctctattatttgaaagcttttcatagaaaagtattgcatcttccctgacttcccatatgaacataccctggtggtaattggtacatacaagttttagatttgagatacttggttatttattgtgttctttaatttggacttacagcacatatattcaattgggacccgttgcaacacacggatacgatgctagttagctcaaacaaatgagttggtgttgtgcccttggtatactaacactccaaacacttgaacatttcaggtatctaatggctggggtcataaaatggaaaatgatgtcatgtgaacaaagtgggaggagaagtgccgaaattgcacgagaatgcttatcactgacacctaatagatacaagtgtcacagctaccaacatattggctatttgggtgactctgcagagggtttcatttgccgtccattgaagtcaaaactaagaagcaaggttggactacatgtggctgcgaaggtacacaataaggacgatgaaggaagctgcagctccagaatttctgatgaggacaacgagacattgtctaatgcgtcgcgaaaaatggaagtaaaccatctgggggcactgagatgctatttttctaaactaaacactgaggacgcccagaagccatattcttttcatcagacgaacaagcagagaactggcccattatccacaaacatagaagaagcaaacatggctactgattatggcgatttcaggaatacgctggaatcattcgagatcaacttcaacagacgaaaaaaaggtaacttcagtttactaagaacagaagcatagcgatcacaaacttcacggaaatttttcttcgggaacataagaaacttcatgaaaacagtaatgctgatttaggtacaaagggttatctaaatactgccgtggaggactacacaaattatttgatatttgatgagaagaacttcctggacatgcagcaagatgatcaaacatccagtttctgtttgacgtaagtaccgaaacgatcttgtttttttagagaagggtatttttacccggcctctacatccaaccggatatatacgtccattgaaatagggaacttagccccgcaaacaacccaattcgagatcaaccgaatcgatcttttgtggtttaattttaatattttgttctcaacacaaattgcactatatacacaatattttgcgtcctcccaccgttccaaaataagttgatttctatcattgtacatacatttggttcacaaatcaagaagttttatcctttcaatacccttttactacccaagttactaataccactcacatatttttttcccaatactactacgcaagagagttgtgtatcatttcgttaatagaaggagaaggtgttaaaaaacatgacaaaacaacaagtaaaaaactcacttgcaccacgaaaagaaaaaccccacaagctatcaccagaacgattacacgaccaaaaaaacaaaagacaagaaacctagccgtgatccaaaataaggagagccaaattccatagacgggcttcctctcttgctagtaccaaagaggttgatagtctaggagacactcttgaagacactatagtccagttccaagaatcaccaagctattcaagcccttccttcctgatattgctgtcaaccaaaccattgattccggtccaatatttatcaaaattcacatatgagggttacgacgtaagaaccccaagcaccacttgctcaaagagggaaaccaaacctgtctagcaaataaatacacaagaaacaagaaaattggtcttatcctcttgctcacaaagagggcatttactaggatgcgagaggcgtcgatgtgcttggtggtccgctgtccaacaccaattgtgtgccactaactacatgaataaatgacattttccagggaatcaagatttttagatgtgttcccaagggccaaaataaatagccccttgaaagagagcgtcatatgcagatctggccgaataaactctacttttgtgttaataagggagacttcaatccccttttttcctagtaataactttttcattttttttctgcttgagatatactaactttttcttaggatgctaggaatggatttatgttacgacatagggagtgtagttttctgccaagatacactaacatatgcaattttttttttttggtgaaacaaagggtgcaagttgggattgcaagactactcatagtcttctgatgaaagatacaaatttccttgagctgcatgcaagcatgcaattctctttcttttctggatacaaaatgtgattttgtgaaacttttttactttagtgcgcagggttatgtgccacatgcgaaaatctctgtagttttgtgtaacttggatcataatatttttctagataacggattaaaacccggcctctacatccaaacatatcccatacaactaacatttatgtgtggaagtgcttgagttgttctgtgcttggtggtagtggtagatgaaaggaaggatagggtgtgggcaaaatggacgagacaagagtaatcacttatattttttccatagctatgttgttataactaattcctttgttggcatattttggtctcttgaccctttgaacttgtatatgaatgcagaaatttactagctgcgatcaatattgcagttttgttgttcgaaatagcaagtccggtgagaaattctgatattgaaaatctctctctccctttgatgtatggagccaagataaatgacctaatactatcgggggaatggtggagactactaacaccaatgtgtttggtaagactgctatttttatgctagattatagaatttcaggcttatttgtccttaacatagaaattttcctctctttttgttcctatctattagttttggaagagagaagctgttaacattccaacaatattgttttaagcagaatatgcatttcagatttgcttatacaaggcaagcttcgtgtgcaatgcgcaagagccctgtgagatatataattagagggattacgtggaggattacagacaagacaagagcacaggggatcgcagtatcccaaagagtacacatagatttgctaaaaggattaatagcaagaagaacatgtttgatgattattggatgcaaatctgtagttattgaggtgacatgtggatagtggattaggtaaaggattgggaaatataaatgaatggaggattaggatgaaatggtgagaaaatggatggctaagattaaaacttgctttttggatggtgagggtataaatatatcatatcttaaactcatttgccaaatatgccctgaaaagtactccgtccctaaatatttgacgccattgactttttaaacatgtttgactgttcgtcttatttaaaaaatttaagtaattattaattcttttcctatcatttgattcattgttaaatatacttttaggtaaacatatagttttacatatttcacaaaagtttttgaataagatgaacggtcaaacatgtttaaaaaagtcaacaacgtcaaatatttagggatggagggagtataatctcatgctcagattgcccttataataggtgttcagggagttgagagacatcagatagtaaaatgtaggttcagagaggaaaatgagacaatactgcaatttttaggaccctcactacattttttgtatgttaaggtaaccttgaaatacaaaatcttctactttgtaaccaaaaccgctcaaaactacaatggtcgtggattaagctagatgcttaatcgcatgaaaaaaattataaaaacatgacgggccaactggatttgagtgtaaaaaacactgccaccttagtgaaaaaaatggtggttttatgtcgaatggtgtatttagacgactctgctagttttgggttgtaaagtagacacatgtatgttcaagtaagtatttttctcttctgacttattcttgtgatttgagttttgcagcactctgggttcttgcacatagcacttggatgttgggtattacttatctttggacctcgcgtgtctagagcatatggtcaaacgacatttttgctgatgtacatacttgggggagtttgcgggaacttgacaagctatcttcacacgtctgagctaaccgtctgtggcacagtaagtgacttggtgacctgtaatattaattggaattatcattatttcaatctcaatttcgtctttaagaaataagcacgctttattgggatttgcatctcagatttggttatgtaattgatagctaagaagaaatgatcatatatacatatagctgtggctgccatcaaaattggtttcattatgagactgtcacgaactacatggcaaactagaatatatgaatgtaaatgctaataaattctatatgaaaggaatttgaattgcaaatgtagtgaccatcttgcaaccttcagagaagagtatatatagcttatgtattgcagatccatcataatgaaatggatccatcttattatggtatttcaaatttgtcttgttagagaaaagtcattctagacggcatgtttgtatataatggtgtgtacattaatgctgcttcctaaaactcagaacagggaccagtatttgctttaattggagcatggcttgtctatcaaagccaaaacaaggatgctattgataagaacgtttcagaaactatgttcagccaggctgttgtggcaacaactttaagcttcttaggccagtcacaatggctagtgtcattgcacggctacccaaaatattataccatcttctctcaaatgaaatcttttatgaaacaatccccacagtggaggggtttcactttgacgtttccaagactaagcaaagcatttaattgatacaagttgctgggatcatttgtacccaaaatccggcgcggcgcgggagaatgcggaggtcgcacggcggaggcggacgcaagagatccggtgaatgaaacgaatcggcctcaacgggggtttcactctgttaccgaggacttggaaacgacgctgacgagtttcaccaggatgaaactctttccttctctctcatccccatttcatgcaaataatcattttttattcagtcttacccctattaaatgtgcatgacacaccagtgaaacccccattgtgactggccttattgagcagtttcgggagaatcgacaactggtaaactgattattttttttactagaaaaggatgcaccataagcatatctctaatgacttctgtacaaactcaactacgtaatataaacttttgctaatatgcgccctttctactgtcattttttttggaagtttaaggatattttattaatttcagcatctttgctatttattttctgtaacaatcatgatttttttaagaaactttaagaataattctaaccaaacctgtactggtagatatggctggggaataaaaagctgacaagaaatccaaccaccataattaaaatgctattgtatgaatttgttaaattatccatggcaagcactgactcatgattttagttgtatcgtgtttgttattgccatatgtacaaacaagtaataagtaggtggttgggttgaattatggaatatttttgttcaagcaaatgcacttataagctaaggttatgtatgaaaaatgtatgaaagaaacattttttttatcattctgtccgtcagattccaaattgtgctataaggattacatcttcaagcaaccaccatgacaactgatctctatgtgctcctgcacatcacaaagaaaattttcaagaatttattcatagtgaattataccaatttcattttttttgcataatcatagtcaaacatctaaacgttagtagccagcttctcagaatctggaaaaactggtttcccagcttctggcttctagttcattttctggattctacaattacagcttctcagaatctgtatcaaaagctggattgtttgggggagcttctgattctgggagaagctgcagcagctagaagctcccccaaacaggcccataggcataaaaaaatataggcatggattctgtggaaacttatatttgccattggacagggcataaaaaaatcagcgaaatcctgattaatctcaagtttcagcaatgctaaagtcaatgacaagaaattataaaatattacttttactgcataaataaagcagagcaataaactttatagaatattttacctttagcatattgctgcttttatcaaggatatatatatataccctcaaactaatgtctgttaaactgtaggacacatcttggggcaacaatttgtggactacttttcggctatttaacctgcccaagtgtgcaggtcgacaatgctgctaagaaaggtcaaaaggctgtggttcttgttaggcgacaggccagtccatggaaatccattgccatcttcgtcataagcataattgtgcttgctcttttcgcctttgcttatggaacacaagcctagatttttcacatggttctgtttgcatatatagtaggtatggcatggccatgagatatggaatgtaacataatcaccttttttttttcttcttgggtttaatgaatatacactggcatttatcgaaatgacactccacaagatgggaatttttaagctagatgccgcaatctagtggaaggatataactcaagtaataatttgtatttaaattttaaatataattattccagtggttacctagctgtaaccaacttagatactttctccgttccaaaatactccctccattcccaactgatcatcgtataacttatttgaggttattcgtaaattctcatcgtattagtatccattccctaagtatattcctttttgtgcattggagtaaatgtaaattggtgcacataactttttacaaccaacatgaatgtctttggtttattgttggctagcaaatagtgggaatggtgtatggttaagtttgttactggagtaaatgtagcatgaaagatttattaatgaactttctgtggtcttggtgcactcctataatatgatgatcaattgggagcagaggaagtataaacataaatgggcaggggtggggtttagggtgggccacaacccattgctaccctaggtctaggtagtcgggtgtattccatagtagggtttatccctttctttctttgttcgtttgtttgttcgtgtagtgcaagaggttgctagcattgcatcctcttgtcttggtgccaagccatggattctggtcttctatggctgaagctctgagtttgtcgaagatgtcatcaactggaagagcagcaggttcttcttgtagcgggttgtgccggctatcgtcttcttctccagcaatacatccacaagaacgttgacctcctttgtcatcggaggtggatctttagagagcggttgagaaatcaaagcatcgtcaaagaaatctcaacttccaactatcgaggccccatttgggtttgcttcatagcgtccttctgcatctgcttgtggtcttggaatcaccgtcactatcgccatagttgtcctcgttcaggtggagaagcatcgaagtacctgattgccttttctatttcttttcaattccttctttgcaaatttcaggagtctaaggttatttggccatctgttaggggtctttctataaaacggtttgtatttatagttgtgtcatcaataaactaatctatgccgaggttttagcctcggtgtttagtcttaaaaaaaagtatgtgttctttcaataagcattcatcattgtaaggtggtgtttagatcagggactaaactttagtccctttcatatcggataaatttggagtattaaacatagactatttataaaactaattacataaacgagagctaattcgtgtgataaattttttaagcctaattaatccataattagcgcatgtttactatagcatcacataggctaatcatggattaattaggttcaatagattcgtctcgcgaattagtccaaaattatggatgggttttattaatagtctacgtttaatatttataattagtattcaaacatccgatgtgatatggacttaacagttttagtcccatctaattaaacagggcctaagtagggctagctggaaatttagcttgggctcaacttggctcgcatgcccaatgacccaagcacgagcctactttgtagtttgagttggcttgcaaggagcttgtttggtttgttggctcatttagtctattagtattgactaaataatgatagttttgtttaacttgctacatatgaataatgatgatgcttaacagtataacacaataaatgtcattgtttttggggcagcttgacaagtatttagtatgcatatgcgatagagtgatcaagggtgtgtttgaggaggaagggattgaggagattgggaagatacgcaaaacgaggtgagccattagctcattattaattgattattaactattttaaatttcaaaaatggattaatgtgattttttaaaagaactttcctatagaaaatttttgcaaaaaacgcaccgtttagtagtttgggaagcgtgcacgcgaaaaacgatgtgctttctcccacaaactcactggaacgaacgctgcctaagtgtcaatgtctatagtctatatggagagaatcccttatatgccactcgaaattgatcagttctcttatataccactcaaaatttaagtttttccacccttttaaaccactcccaacactatagtgtttgttaactagtttttttcataaatgaccaatatgccctctcaattaaaaaatgtgtaaacttcaaaaaaatcataactaatttattttaaatcttttttgagtgaacaaaattttgtcagaaccaatggaaaatgctctttttattaaaaatattgttggaaagctgtatgtttcatacttatattgaaaatttatttgtgatggtgatggctaaaattgcacgtgattgaaaaaaaaaatcaattttcatagattatatccagtagatatattagtactaaaatacctatcattggttgtataccaactctcaagggcaaatgcatctttttactacaaagttaacggtcaactgacggtggagtaacgacaatggcataaaagggaggacaaacttaaacaggtggcatagaagggaggagccaatttgaacaatttgaagtggcatataaggaaaccggttaatttggagttgcatataagggattctctcctatataataggctgaatgaagcctccccaaactaatatcccccactccatgccaaaatgacagtgtacattcacgccaccctaaactttttcagccaagccaaacgacgtatttgtaaataaaaaataatttgtgaataaaacttttatatacgcactagtagagaaaaatagaggttggtattataggtgccacagcaattaaaactggtacatatagacatgttcccacctttgtgcggtggaaaaaaataaagaatcggcacctttcaagaattacaggcgtcagttctaaagaaaaactgtcacctatactataaataccggttttttaaaagaaccaacacctataatatattattggtgtcggtctgtagaaaaccaacaccaaaaaaccgagccaagccaagcatgacacccctatactccatccttatccacccccatccacatttctctcgctctcccctgccactcctctccctccgcccctctcaccggcggcggctccctccgccccctctcgcctcgctttccccctccatctctccctccgccccctcctcctctccctctcgcctccctcccgcagcagatccggcggccgctggtggatccagcagtggtggcggcgtcggcagcaatggtggttgccagggcggttccgacggcggtgagagtgaagttcttggaagttatgtgatgtttttacatgttgttgtgattctatgattccttttgtgattttgtgatgatgattgtggttgattttgggggggcaaagtgttgtggattcaattccaagaagtaatcggtatgtgactagtggcttagtgttctctgtgttcttggattggattgttggattgttggatgcattcgagtcgatgcatccagcaagatttattttgattcatgaaacttgtgccggttttaaaccgacatagaaatcgacacctatttgattttcacatcaataccgctttctaggtgtatgttgggaaaaccagtatctttgtggggttcccaaccggggcacctattgtcttttatgtagtagtgacgtgttcttaacgatctagaagcaaatgctgaaaaataaactatgatgaaaaaaaaccaaaatcaactccaaatttaagattgaaaattcaaattttgcctgataagtataagcataagcgaaaagatgagaccgtttcactcccatgaacgttggtgtttatatgttgagtttgattccattacatcgattttgctagaaagattatcgagtcggtactcgccactcggtgcctagacttaaaaatatcatggggcaattgcatatgtgcctccacttttaaacccaattgttgttttaccctcactttttagggtttgcagttttaccctcactttttgaatctgaatcagccggctacccctacttctaacaaaaggtgtaacggtgttagttgtacaacaaaaggacatttataccatcaacatccaacaacatcgcgtaggggaggacctggagcaagggacgaggaggagggcgacgttggcgctgacgtcgacgtcgagcaggatgggatcgtcgtcggccacgggagcagtagcagcgacgacggtggggggaggcggaggcggacacaacgcctcagcgtggaaaccagcggccacgggagcagcagcagtagccagtgaggcgcccgccgccgtcgccagcgcccgccctcgcagcggccgccgccatcgcccgcacgccttcgccgcggttgccgccgccgccgtcgcccgcacgccttcgccacggctgccgcccccacgcgcacgccctcgccgcagccgttgccgcgccgcgtgcaagctctcgccgcccgcccgccctcgctgcggccgccgccgtcgcccgcacgccctcaccgcgactgccgccgccgccgtcgcctgcacgccctcgccacgactgccgcccccgcacgcacgccgtcgtcgtcgccgcgccttccgccagagccattgtcgtcgccgcgcctcccgccggagccgccgttgtcgccgtgcataaggctggcagtggcgcggctgcggcgtgcccgccccgcggccgctatgcccgcaacaagttagtggcaccgagcagtccgcgtgcaagcccgcaaacttctggcggccttgcccgcctgcccgctggttctactttgcccacattaaaagaacatgcatgataagataatcaacttgctatttgtgtgctagtgtttgtaagtagtagtaaaccacagtggcatcaattacaagaaatgtttgagaagaattcagactaagcactcaatcccaaacaacgaaatttcctccaagattttgaagatggcaaacagaatgacataagtcacagaaccgttgcattgctcactgaatttacaatattaatgtgagtggaataataggacattatgaatatcctaatgaagatcaaactaacgattgtatcaataacacaagactgttcattgcagctgctctacttcaatgcctgatggtgttgacgcttgcaaatcttcaggttctgcatattgacaaatcatgattatatatgagtttttcatcaggaagcactacttcgtgaatatttgaaagaacaaaggatgcatgttacttgcactatgcactagttcagacgaaaatttggtactgccagcaaaaaaaaaacaggatcccaggaaattagcaagcaacctgctagccataaagaatcagaagaatctgcaggcaccaaagagagaaaacaacctgcaatttctgcataattgagttatgcataggaagtttagaatggtataaccaaaacttggtaaaaaaatgtgggcaattcatggcaaagaatataatttttttgacgctggcaaagaatataaaataaatcaacattcagacaatttggaggctacattcagcacaggacctcaatgttcagactttcttaaggaacttctcaggaaccctgcatatactgacagaattgcataacatcgaattccatgaaaatataatccacttaacgcaaagaaagaaatacaccaccatctgtctgtcagtaaaggtgtgctcccgtctaagcaaaatgtaagcacacagtcatatgcacatctccacactgaatatcagtggcaacacaaggatggatatgatgtattatcaagtatcaactacttccaagtcttgaatcatccaaaagggaaacaaaaaagggaacaaagctgatttgacatctaaattcagtgaaatagcagatcaaacctaattattcttttcttcaatttccatttatcatctatgaagtgacacgtgatgcataaataacccaatttttgctttgatgtccacatgtcggcagtgagagaaagcctagaattcgagccactcaaaaccacttgtaagtctaccttctgattttgatactcactaatgcaatcagcctttatggtattccttgaaatatggttgaaacatggatttaaactagccacaaaagttctaaacttagagtattccacaaagctaaagggtagctcgtgagcaactattaactccaaaagctttctccgagacacatgctgatcaaatgtccaatttgtgagggcgtcagcacatgatgtatcagatgatacacccatcagttgagaatacatttgatccattctagctttgcccttatattttagtaaatgtctatgacaactactagtccctacatctcgtgtagcctttaatattttgccacaatgaacacattgagctcctgtaagcacctctccttcatatatcggatcaaagtctttccaaacagttgaccttaatttgcgttttgatttgcttctagatgaacctaattatttaaatcaatcatatattatgatttatgaaaatatcaaacataatattcaatgtacagtaaatgcatcaattgcctaaataaatagcagtaaaattgaaaatctatttttttttctgacaattgaaggttttattggaaaaaaatacttacgatgttgaagtgtagttgcttcctcaggggaagaagatggtgacctctcgtgtgttggaggtggggacaatgcacgtggtattggggaccttagcatgggtgacatcataatacgaatccccggagacctcaccattgttaccatagttggttttgaccgctttgttgttgaatgctttagttgtttcgatgttggggcattacgatttgctttggccctcgaggtatttgaagccagtacccctccctctcgagtcacctacagcagtaaaaaggaaaaatgaaaaggtaaacatgggttggcaacctgaaactgtcttctgaaattgtccttagtcggtgcaatgctacactttgtttgattcttaaactgtcttctgacataaaaggaatttgatagccaagcgactgcattatataattgacatagcttaaaatctagggggctctgaaactcatgaacaaaacagataatgattttagtgctgaaacttagctatccaaggctaatcttgtgtgttcaggctaaacttaacttaaaatctaaggcatcgactgaccattggagctaaccataaggcttgtcagaattggggacttactgtaagcaaattatttttttaacttgttttcatgtgtgttgttacatgtaaattgttgtttaatcactaactttagaggaaaaagaagcaggcatatcacatatttacatcccaggtgaccatcaagcatgttatgtaaaggcaagccatcaaaactgcacattgttatgtcacgaaagcaactaatcacagacaagcaggaactagataatcttcttttttttaggtgaagtgatgcgtacatccttacaaaattaaatatggtttgaatctgaaaattacatccttgctactggattcaacctactcaaattcactacatctacatctccttttcactgcatccacatcaagggaaagaattcaagaactcacctgtgtagatgtcgacgggattgaagcagaagctagtatagcaccacccacagaaaatgacagaacgggcggagtgggtgcgacgagcaacgatgaatgcaccaccatgaccggcgatgaccacgaaggtcccttgaagggcgcattggaagcggcagtgctggcggaggtctgtgagatcactgggaacggcggtggaggcggtggcgaaggcggcggcggaggcggcggaggaggaggcggtggaggaggcggcatcgaatccatggcggtagcagctagggttcaagccgcaacaacgacgaacttgttccaatcctctttcactcctcgttcctcctctttctgatgctcctcgatgtgggctgtggcggcgccgctggacgtggtgggcttaccgcattagcccacttactcctaagtggtttggcctaagtgggtaagtgggtaagtggtgtgagcctacccagcggctgcatcagcccacacacgccactgccagccttagccgtgcacgccgctgcactgaatcggtgcttgacctgagcagagctgtgcttgcttgcttgcttggatccttatccattcactgaagggtacaacagtaaattaatatttcataaaaagatatttctatttctctttgtatatttttaacccaaaaccgtgggatccatctaacggggttaaaagtgagggcaaacggtgggttcgtgttaaaaaagatagggcaaaaatacaaatcctaaaaagtaggagtaaaacagcagttgaggttcaaagtgagggcatggatgcaattaccccaaatatcatagtataaagttccgtgattgttaaaatcctctagaacagcttaaaaattcgtaaccatagatacacactatgacgcgcatggatcttctccgcaatgtagaatatcatcgaaagatctgaggtcttattagggagtgcgtgcgggagctatcacactttaatgcacacgtttaagcctgctaaacaatactcagattatttagtacactacacaacggcatagactcggcaagctcggtctacctactcaacgtcattgctttagtatttttactcaaattatttagttattattagtacagtacaatagtagtgaatagtctaaagactcggcatggtcagtctactctaacgtcattgcttagtatttttgcttaacattgttaacaaacacttgggaaaaggagctctgcccaacggaagggaaggtatccccatgtgcttgtgtcattggagtagcactgtgttaattattagtgtggacgctgatgatgatgtccgatgttgagacaattttcgatcatctagagactaccaactcttttttcttcttttccttcggtgctacgaaaacgaaatcaaagatgaatgtctccgtgacacatgggcccactctaccatccgcaagggttccaaaatccaaccgcaaaagtcatctggaatgttatgtaggccgacgcaacaaaaggaaaggcgcgtcacggcgtcagacgagacgacgacggggctcgctttcttcgaaaatctgcagcacccgacgacgcgcatccctctcacgaccacgaggaggaaactacggccgcgaatggctccgctatcagtaggccgtttctacttgccaaactggggtgtactatgggcatgtttggattaaagccaatttttgccctaccaattatttagtagttttgaatagtgcttgttagctatttggattgaggccaaatcttaccaattcaatagagttagaaacaacataacccaatcaaaattccaaaatttatccaatatttgacattaccaaaattttggtagggtttcaaaccaaaacaaccctatgtccctgtgctgtgacgggagaaatagggaacataggaggggagcgtgcgggatccagtcagcaccgccgccctcccgcccggttgcttctcccgtccaaaacaagcggacggcgacccgatcaaacaaaccttgtaccggtagcgcgtaagcaaggccaagtcgcacaaggccgggtttggattgtagtggagtggactgtgcagacctactcgactatactactactatataacaggaagaggaccgaacggagaggcgataaggagtaacgagtccactttctcaagcgctaatctaatctacttggggcagtggtaacagggggaggccaacgcgggggaaacagctgacgcgctccgctccgttccgctgccgccgttggccggccgggcggtcgctgttgctgacttgaccagagacgagcagcaagggggcagttggattggattagagggtgcttttatatagaggagcacgaggaggaggaggaggagggccatcaagcatatccatctccgattcacagattctttctggagatccatcatccagcgagagcgagagcgagagggagaggaagagggaaagccgccaccgccatgttggggcatctggttgggctggtgaaggtgcgggtggtgaggggcgtcaacctcgccgtccgcgacctccgctccagcgacccctacgtcatcgtccgcatgggcaagcaggtcgggacttgcacccgctctttcttcttcttccccttttcaccgctgtgttgtgttattttattttggtccagaggtttatcgtgttcaggcgatgtctgatttgtgaatttcattttttttattctttttggctggaaagaggtgaacaaaaagggatcttgttgaatttcaatctctctctctctctctctcgccatttttctttctaccctggttaattgttcatgtattgtgtaccttttgctgcttgtttttttttattgttcgcctgctaactatgatgatatttgctaacatttcgcagaagttgaagacacgagtcataaaaaagactaccaatccggagtggaacgatgaactcaccctctcgattgaagatccagcagttcctgttagactggtatatatcccctttccttttcacttcgcccttttctttcttgttgtgctacacaaacaaataaaaatgaaaacttcacgagtattttcttactatgccatttctcgggaaacaatggataataaacattttggtatttaaagtggattgtcagttggattgttatactgattggcaagcgtaatcaactagacggccacatcacttcaaatgctaaaaccaagtaggaggagttgtaatttttatagctagctctctatcagacgccattctaatcggactaaattatctgttctgcatacaagcaccaaatcttgtctaagtaatattcttacttcttatttgcttgagtaactgttaagcaagggactaaatctgatgttttcttgttggtgaattgaaatatagcaaacatttatttatatatatcttcttgagttgagtatactcctacctgcctccatggctgaatttagaatattaattttctgaataaagactaattagcactccatcagagtagtacaaggctcattaatatttaccagaacaagtagatactaaagaatattctgatctgttggagatatagtggctggtcagaggccgctaagtggctttaccaataccatggtcaggctaacgccgtcctctctaaggactgttttggattgctactgaaatgtgccctaccaatattttggtagcttgaataggagaatattagtatctataataattcatttaatttgaagccaactatttgataatatctatactaaatttggtagcaatctagaatattctccactatagtatcacaatttagctctacgtttggtagcaaaccaaacttggccaatataaacttaccctaccaaattattggtagtgccaaaacttgtctagattttggtgctaccaaagaattggtaggatagtgaaccaaataggcccaaataatatgatttgataaataattctttgaccaaagagtggttctgatatatagttatattttggtcctgaacaggaagtgtatgacaaagacacattcatcgatgatgcaatgggcaatgcggagctggacatccgcccattggtggaggttgtcaagatgaagattgagggtgttgctgacaacacggttgtgaagaaagtggtacccaatagacagaactgcctagctgaagagagcacgatatatatctctgaggggaaggtgaagcaagacgtggttctcagactaagggatgtggaatgcggggaaattgagctccagcttcagtgggtcgacatcccaggttctaagggtgtatgaactctgtactctgcctattgcttacagtcttgcatagctcgcaagtccaactctaagtttatcagtggacaatcaaataagcaacagcttatattgatgagattcttttactgtccttgaggaggcagatacctcccagtgcctcctcaatggctgtaaaatcattcttatgttgacacagcaagtgtctcgaagatcccccactaggtgtttgggcagagcaaagttgtacaatatgtctgcaaagtatagtttggtgttaccctgtctgtagaaaaataatcagtggcaggggttgtaactattgaaactttgtctgtctttcttcttgtacgccaaagaccaatgctatctgcgattaatcttcctagctttcatgcaaaatttgattgtggatggtcagccagtttacatgcaattttgccagcaatcatgtcatgttatgtggagaacatgttagtgctattggtctcagcattggaataactgcagtcaagatacactacaggacgaccattttactagtggtaaatttagagttttgaactaggaacatccgaacagacgagtataagacagtatgacacctaactactgcagacacccttcacaatatcaaacccgggtcaacacatgagacggcaggacaataaaatcagtggtaatacttagaaagttaccttctgtttcatacgtatcaaatcatacaaattttaagactggccaaattgtataaaaagttagtaaatatctataacaaacggtggcgctaattagcgcgttgggagctactagggccgtgacgcgcctcatctgtccctccggttttcttgttttttctcctctcaatcacatctcgctctctttctttccccccccccttccccctcccattttctgtttcatcgaacctacttttaaattttccctttttgtcaccttcgatgcacctcccacatacgggttaaaaatttaccaccaaatatccacgagtagaagagttattatcactctctcacaattacaaaattcccttctttgtacctcccacctatgggtaaaaaaaaaaaaccaccttctcatttcaataagtaaaagaattaccagcttatcacgagtagaaaattgtttcttccctttgatctagagtaaaagaattaccataaatgtcaagcaaacgtgtggttcagttcgtttcatatgcaacagtaattaatagtaatttatttactccatttttagctctatgtcagcacaatatttgcattagtaactcatattaccacgataacttctggatagtatcttttttaccctaattacatgtcaaacacagtactttttgaatctttgaattataaaaataaaaaataaaaaaatcggcagcaatatgaaagttaaatatgaaagcgtgtcataggattgcataatgattagatagttttgacttccaaataagttctttccaagttcacaattctaatttgaggtaggcatcaagtaataattgttcataaattgtttctcctctatgtatcatgttcaacatttttgtatgcaactatctgttcctaaaaatgcttgtagtacatgatttaagaaattaacatgttttttttctagataagggggatgccatcagatttccttcatgaagtacttacagagctatttatttatcagttgaatttactaaaaaagaaacaggttaaattcagagtgttaatagatactccctcattccaaaagtcaaagacctatttcattctttaatttttccaaaagtctaaatcctatttgtagtcaccatgtactaaattaaattgtttattggaacccaagtagtcattgtagtacttagggcagtcccaaccctccacctaggatggtgtctatggtattaactacattgccatgtaggacttttagcttatgtgacactatattaattaagagatagagtgaaaagaggaagaaactgggtctcatgcaagacacagcttcaacacgagaacctatgcactagacactatcaagttttgcattgggagagaatagtgtcttcataatagatgaagaataaatataattggtagagaagagagatgatgtatttattaatggcccactttaagaaatcatgggttgtggagtgtagtttctattgagatgttttattgacatggcactatagacactacttatggacactatgggttgggactgcccttattggttgcatgttcattgattttatcatatagtgaatgaattaattgctcattggtcttggtgcataaagaaataggagtatgtcttagacttttggatggagggagtacatgatttatcgatatatgctgttgtattgtacgggttcagttactcataaacattgtagtattctgctgaactgttattgcttgaattctgaggttgcaacttctcatttgattctccgaagctgaaaattcttacctttcgactaattggagaaccttttgtatttctttagtgtacaatcaaatcacatgatattagcatcggacaaacgatggcttttggcggcgagaaagggtgccaacacaagtgctggcttgattgttgaacatggccagtgcctccgtaggggagatagatatatgtatttgttgatttggagagaggaaaaatgtgtgtgtgtgtgtgtgtgagagagagagagagagattgttgtgcttttgcaatagaaggaacattatgtgtggtggcaagtgtatagcaatagctatcttttatggtttatatattgtaaacctgaatttagcagattatgaagttgtacattaggatttaggaataagattgtttccaaagattgagaagtcacggtgttattttacttacctggttatgtaattaataatatagtaacttgctctatcgttgtttttaaaaatattaaacctacctcatttaatgcttttgattgtttaatttgcactttaaaatattgtcgtagtgttagcacgggctaattactagtgcaattaaatttcatttctgttattccttgaagacaatatttcagttctattgtctctcgccacccgcggcgaagcacgggttcccatctagttttatctttttgatattttccctttgccacaacattactgcaatggttcgctctcttcacaacgcaaacgcacgaatcaacagttcgataaggaatgaaacttttcagatggtcatggtgcacaaaacagaaccatcatgctcaaaaatcatgatgccaatagttcaccgttacagaacaagacgaagaggttgataagaaatgaggttcaatcgttccagcacataaatactacagagaaacgaggttcacatcattctagcacgtagatccgagatgcaatgtcttggacgagccaatcgaaaccttgaagaaggccctccccggtgtgcgcgctgcagcctacgatctgccagtgccggcttccgtccatcgcttccaaattgagtacctgaaaacagcgaacccaagttgtagatcagccttggagaaagccacaacttcaagccaaaaatcctctgctagtatgagttacaactagtggtatactgctagtatgagttacaactagtggtatacagtatacggttttcagagtttccaatgtttccaagatcccatacggtgagtatttccaagccaattcaatcctttatatatccactcagtttttatactttcgagctatggaatacagactaatcaaagttctaaatcgtcgtagatcatgagttgggacttagtcttgcctagcgcccagtggtcaaaactgttcatggtagtcggctggctcttagaacagtgcagaggcttttatctacatctgaaaatgtttggccacactaacactaaagtgcgtactacacagtacaggagcatgttaccacaccaacacattcatttccagatagaagagtcagcgttcaaccctgacaaaagctatactttcaactttcagaacatcgtatcagcagcgagatgcacaggcagtggttttgctgatcacttgctaccagagcaatactgtaagattacaaattgagatgctcatataaaatttttaccactcatataaaacaaatgaagctgaaagggtaacgaatgatggagcagacatgatattacaaaccccttctagtatcatctaatttagttcaagtaaattttgaaaatctatgactttcaagtcataaagaataacagtcattgtaaattttgaaaacctatgattcatatattccgtattgtgacttgatcaacttaagaataacagtaatcaagaaatgtatgctacatatcatttatatatgatgtttcatagttcatttttgaagtaaccaacgtcatacagaagtggaaggaaagtgttacacaggtttatgatattttgctcaccagcaacactattcctcagttcagtcatttcacgatggattatgctataagaatttgaatgcactagaatttcatgggctcttattttagttttataggctctgaattcttagataacagaaatgaagaaggatcattaatggacagctacaataacccagaaaatggcagagttaaggcatacatatgtgaaggtatcatggttattaaggcggtatggcgagctaaggcactgcacacccgcctcaacgctattgcggtatagcggtatggcgtggcgacgccctaagaataactctgctagcgatcagaggagaaatagggaataatctggtatggaaaatataaaaaatggcaaaacagcccatcaaaccaaccctcataccggcccacaaagcccaataacctattaggttaaacatctataccctaaaagcatcgtgcatcagatgtccacagccgccgccacatgagaaaaccaagcgaagaaaagaggaaggaaacaggagccaagccgagcagaggaaggaagaggtgaatggagcagtgaggatggcagcagggaggtgagggaaacagatctgccgcatccagagctgatggttatgggagtcgtggatactgagacgtcgtcgctgctgctagggttccagataagatggaatcctctctccctctctctttctttcttttggtgatgttttgggtcaccataaccccctcttctctcctggcatgggattggggtcgccataatccccctattctctcctggcatgagattggggtcgccatacactggctggtatgtcgtcaggacgccctggagccagcagagcgccatgcgccttcgcgacgctatggcgacgccttaaaaacaatggaaggtattactgaggatcccaaatgaactttagtgtcaaaattaagtatcttttgctaactgtacaacaattttcttagggcaagaattacaaaccatgtgactgtcaactaatattgaaaaatcaatataccagaaacaactatatttgtctaagcttatgttgcagaaaaaacctgtaagataaagaatgaatgatagatcttattataaaggatgaataaaatctgcttaccttagcaatttcagaaggtttgagagcgccttgaatatcttgcttatttgcaaacaccagcaatgaagctcctgctagtctctgacaaataaaagtataaagcatttttcaatgatagtgcagtttgaaaagggtgaaattgtgaggccaaatgccaaatggatgtttattcagtgatgcatttcagctgtgagcataacggtcaaggtacacattgcacatccacttagtgttatattggtaaccacttagtaaaatacaaagctaatgagaataagttgaaaaagagaggtctgaaaccaatgtagaagctgagcaacataaattttgctcaaatgctttgagttcagtgtccaattggagagaaccaaactgctttctgatataaacatagaccgctcctaaaactaaagaaaagggacatctatatgccatactaattcgttttctgtacttattagaaaacatccttgcgacaacaatcagctgcaatcaatgaaggacataattagatcctgtcatttggtggcctagaaatagtacctcttctttcaagagattgtggagttcagcacggcaatcatcaagcctcctaatgtctgaactatcaaccacccaaactagtccatcagtttgctcaaagtaattcctccagtaagatcggatagtcttctgtccaccgatatcccatatgttcaatgagtacctgccacaatgacaaaacaaacattattcattaatttccaccctgaagtaatacaaatggaattgctatgcctagtgttttggctgatgcaatgatcagtgagtggctgccttgaacatgagacttttgtatctacctttgtgttgtttgttgacaacaatgtgactaacatcatcggaatgcactaaaacaggggcacttcagattgaagaaatgcaagcctgaggggaaaaaaaatcaggtacttaaccaaaaaccgtgaactcactctaatttagctctagcacctgagttaagttttttctgtggtgaggtccctagctccctacatgtaatcttttgtatattcttccccaattaatgtgaatggtcatgcgatatattacaaaagaacacataagattcacatttcgaatgaagcaactggcaaaactgatctatcagaccactagcctatgcctttttatttcacgatttaacaagctttaaaattacgtggtatagatgaattatcgaatttctcccttgctgcaaggttttgtcctaaataggatctgtacaccattttgatggtcctaaataggatctgtacaccattttgatggaaaaaaaaataggaacactccaacatcacatgattccctttgagaaaaaaaaaaaccattgtcaggtgggtgctcactggatcatatcaggtgaaatttcatctaacttgaaaatgaagacatgtcaaattcagcatatagaagatgcaactaaattatatcaacgatgaaatgtgtcacctcgtatccatttaatggttatgcccatcatttcacatgaaaaaatcaccttaccgaaagcaagtttacatcataataatgcagcagtaagagcgacagaagaggaccgatgggactcatacttgtggtacttgatggtcttgatgttgaagccgagggtggggctgatgacgccggtatcctccccattgatcttgagcacgatcgtcgtcttccccgagttatccagccccctgcgggtgaacccatagattccccagacagcatcaggcacaaaaaatcaagaaatctacagaggaacgaaccgctcaagcgccagatccagaatggagagagaaggattgcccacagaatcgcaaaagaaactctgggggtggaggggggcacctacaccatgaggatgcgcatctccttctccttgcgcttgatcttccggatgatgctgagcagccccatctaggaggcgctcacgggactcttcgccgcccccgccgccgccgccgccgccgcgcctctggcaatgggcaggaggcagtggcgtagctaggaatttttcgtttagtagtcctacttcacaaatcacaagttcatattacataccaaaatttttcgaacaccataaatcccatatacatgttgataaatctgcgttggataccacacatgctaattttatcactatgattttagatagaaatagaaacaacctataccaaagccctcaaaaaaaattcaacatgattataatttttttctcaaaaagaaacatgattatcaaattttgcattgatagaacttaattgtgaaagggtgcattgctccgattactattttaattcaaatgaaagcaatgttgtatggcattaaaattagagctcacctgtcatgtatgatgcgcaagaaatgtatttgcagacaattagttcttgtaccactgaaattaaaattggaaacgcaaagccagatcccaacacagcagtaaacaatatttgcagaatacatttttgattgatgtggcaatcctaatgcagcagtgactctgaaagagtgcatatatctctagaattgaatcactcttactaattcctgaatcaaaatttttggagtagcgaaagaagattaccgagttttcgagagcacaaaattaattaagctggctggtcaggggtcatgggatcccggtgccagcggccgatggcgcctcggcgtctgccttgcggtggccgtggtgccttgtcgcggcggttcctcgaccctctgccgctccgtggattgagcagacgggagggcaaatgacggcagtggctcggcacctcggttggcgacggacaacgggaagtcggggagactgaggcggaagctgcgagaccgaggcgatggagaggtgagcggaagagcccgggaggggaggaacagcgacggcgtggggtggggtgggggaaggtggcgctggggagggggaagtgggggatcgggtttggagagaggacctaggaggcggcggaccggcggtgggtggcggacaagggcgggcggccggtgatcgtagcgggagcaaagcgaggcaaaggggaggaggccggccggccggggccgcgccggcacgttgatgcctttcggcgccggtgatgccggggcggcggcacggggggggggaacctgttaccggagggaggagggaggactctttggaggaaggaggagcgggctcgccggagccagcgctggaggggagccgcctgtcgtcgccgctcctctccctcggactggaaatagcgatgggaaattgggaagagatagagagagagaaaaaaccgaaggaaagagaagagagagcgctagtggagagtgggccgggcccatgtgcgcgacttggcctcctggcgcgcgggcgcgagataggaagccccagaaccaaatagcgagcatcactagaagacccacaaccataactcagtggaataagttcatctgaggtcccttaattttacaccaaatccaattttcgtcctttaaccccaaaaccagatacaaccggtccccgaactatcaaaaccggtacaaacgaggtccctcggtggttttgaagacggttttggctaacgtggcgcctacgtagctggttcgactaggtctccgtcccacgtggcattgatgtggcaattatatctcggaaaaataattaaaatcgtgggcccacatgtcagcaacataaaaaataattttaaaatggtggggcccacatatcagctaaaaaataaatatggtgggccccacgtgtcatctccctcttcccattcggctctccctctccttcctcatcatgccgcaacatgccaacgacgatggtggcgaccgaagcatcggcggagcggcggctgcggcaggccgcgagcgagggggcccacgaggagcggagggcgcgggcggagcggcggcggcggcagggcgcgggcggcggaggtggccggaggaggaggagggagaggagtaggtcgccgccgagtttcgccgcctagaggacggcaacaaggtcgacctcttcgccatgtttgacggccactccgacaccgacgtcgtcacctacatccggcgccacaagtcatctccctctccccacatgtcctcttgtgcggccgccgtcctccacctccaccggccttcgccccaagccatgccgcctcatacgacgacgccgcctcctctcgccctcccatggcgcgccgcctcggccggctgtcccttctatctccatggagttggagaaggcgacgaggttgaggacgtcgccgcgggactgggcgaaccacggcgcggaggagacggccacgcgaccgacgctcgacccagcgaggcggcggctgtggcggcggtatggctggcgaaggctgaggcggcggtgggggatggtggcgctgatggcgagccggccctggaaggatggcgcgacgacgacggccgatgcggcggcggcggcggcgggcgtgaggaggccgcgggggtcggcgtccaagaggcagccacgcgaggaggcggcgccccacgcggcgcggcggcagcggcctcggtggaaggggaggtcagcgtggcggcgcgggtacccagcggcttggccacgctctgccgggcgccggccgtgagtgaggcggaagcagctgcagcagattcggctgtgcgcggaggcggcgcccatgcagcgcggaggcgttttttgcttggtgctgcaggtggcttagaggagatgacatgtgggggccccaccatattttttacctggcatgtgggtcccaccatttttaaattttttttttgtgtggctgacatgtgggcccacgatttttattattttttcagatataattgccatgccattgccacgtcaatgccacgtgggacagagacctagtcaaaccagccacataggcgccacgtcagccaaatccgctttcaaaaccgccgagggacctcgtttgcatcggttttaataattcgggaaccagttgtatctggttttggggttcaaggacgaaaattgaattcggtgtaaaattaagggacctcagatgaacttattcctaactcagtataaggaaagaaaggtgcaccacacctgtacaacacgttaggaattaagatgggggaagaagggatggggagttcgaggagaggaccactgccgctggagttgtgcagtgctcggcaccggtcatctccaccacgacggcgcagcggcagcaccacgtgtgacggcgcagcggcagcaccacgtgttgagagacagggttgacctctatcgtcacctcctacctactagatcttcctgccgatgatcaaggaagccaaatatatagatctagcaggtaggaggtgacgacagaggtaaaagctgttgggggctgagtcctcatatatatatatacatatatatatcaaagaggccattccctacaatgagcggggcaggtgcactccaccgtgcacatacatacatacatacatacatacatacatacattatacatatatatgtatgtatgtatgtatgtatgtatgtatgtgcacggtggagtgcacctgccccgctcattgtagggaatggcctctttgatcgcctccgactctgaactccgagtccaatggtggtcttcgttcgtgcgctgcgtgtccactagtatctctaccaaattagtttcattaaatccaatattaaatatattttgaaaatctattattttgactttaaaatgttgctattttttttctattaccttagttaaacttgaagaagtttgactttaagaaaaaaaataaaaacattttcatccccgtccaaaaatatagctatatagtattatgaacctagaataaaggaagtataatatgaagcgaagggagtgtcatgcaagcgatgtagtgatcgtgtcgaccacatgacatggaatgggacaggctgtgatgaaccctgagttccttttgacactcaagacagttgtttggcccgatctttcggtgagttgatgataactacgatttggaagaaacgttgacgacccgactacaaccgtacaagacgttgtgttgcgcctttgcgatcgatacacctctccgtgggttgttgatcttgccagtgtggatcaaccttattcctacaagcaaatcgaagaaacaagcaagaacaagataaaagcaatctaaattgcaaataggaatgaatacacacgataagttggggtttcgaatacaaatagacggacggtctagccgacacgcacgctgcaaggaagtaacaatggctaaattttcatctaaacaaaacccaagaaaccgtgaaggggtacctagctatttataggggtggatggatgaccaagggttctctaaggtcgttgtccaccaggttggggcgcaccccacataggcctcacttgggccggtgtcacaccccgaagttctcctcccaagcctaaatttaatttataaatgaccctaagaaaataccggtgcaaagcaagagtaaacccttttaaatcaatgcaaataataatcggaattggcatgtggaatttttcttgagttctacatgacgaaattctctaacaggatttttagtggaattttcagagccctagaaataattttaaccaattaaaattgagcaagcaatattttaattccagggaaaatccttttctcctttttctttttctttttccctccttttttcgaatgggccgctggcccattctctcctttcctccccctcctccctgctgggctggccgcaggccgaggcccagccaggccaccccgccttcctcctctcccggggtcgccgacaggtggggcccacctgtcgggtccttccccaaccccgccgcacgcgccctcctcctcgtgggccagcccaagccgccctccctctctccccgggacgccgacaggtgggccccacctgtcggacccgtccccttcctccagccggcgccgccgcgcccgcaaccgccgccgcgcccacgcttccgccttctccgggccacgtcagccacgtccgcgcgtgcgccgcatctcccgcgcccactcccctctctctcgcgcccgcgcccgcgcccgagatggccgggattcgattttcgaatcccgcctctctctcctcccccacttcccacgttggccggcgaagccccgcctctcccggccacgtccggccctcccctcccctatttaagcttctccgtcgctccctctcgctttttccccatttcgccgaactccctcgtgctccccatcgctcccgcgccgtgcaaccactcgccgccgccgtctccgctactccggccgccgttagccgccgctaggctcgccgccgcaccgcgccgtcgccgccgtcgggttcgcgtggccgagatccaccccgtccacccctccttcgtcgaggttcgtcgccggagcgccattcccatcgtgcgtaggtgagggtcgccatgtccgccgctttcggccggcattcccgtctcctatggcccctctcttcctctctaacctctttcttttcgctctttaggtcgtcccggtcgccgtccgccgcgtgtcgacctccctccgtcgttcctcgtcgccggacgccgccgtcccctccggtgaggactccctcccctttccttttcttccccatttccccgtgcgttgctgccgctcgcgctcgccgtcgccttcggtcgttgccgccgtccgctgccgccgctttcgcgtcgcttttgcgccgtcgcctccgccgccggatgccgtcgccggcaacgcgacgcgcgcgtgccgccgccgctagccctggccggccggtcggctttgatgccgagccgagcccggcggccgcctctatcgccgcccgtccgatcggcccgagggcgatctgggccgtcggtcccgtggaccggcggtggaccacctgcgtggtcccggtccacggtgaaccgctctcccttgagccgctgaccagtgggccccgcttgtcggcgccgcgcctcctccccccgtgctgacgccaaccctgggatttattgcacaataaatgatttaaggaccttttgttatagtaataaacacagtgaatcttctaaaattcttatctaattcatccgagctccgtttaagcacattcaagtctcagtaaatcaagaaaaatgtgtagaatccattaaaaatggttttgttctctgtttcagtagtcttatagcctgtttgcaatgtttgccttgtatgtcgctagattccggttcttccgacgctccggtgtacttcgaaatagtcgctgaggttcctccagcagcagagcaaggcaagtcatgcttgtcacttgaacatgttgatcctatattgcaaatgctctattgttttccttcaaaaattgcattgttttataatgttactatggggtgttacctattgtcatagccatgctattgttgtaccatatccctttgtcagcttggggttataacatgactagagattggactagggattgcttagccatgcttagttcaactagtgcacaatggagagaatcctactaatgtttagactgttggttctaagggtaatgttggattagtgccaccgctttggtgttggttaattaaaataaatcacatggtgggctgtgggtgcatggttttgctggtcgcacccatagcagttaaggaccggttcgcgggatgccctggaagaacttatcgtacttaccacaagccagcgtgggcaacggctgggcttgtagtgtagctttcctctagtcgacgcatccaggcaagggtgggcgtgatggagcggggcgggccctgcgacggcctctgtcgcttccggattcacctaggcacgagaggggactgcccgctgccttgcgaggagtaggggtgaaacctgaggtgtggtgtgcttggttagaaggggttatgcgaagggtcctgtcacggcctctttccggtatgtcgtgatgacatgttggcgcacggtaatgtgtcgtggggctgtgtcttgtgggtacagttgtacacctctgatcagagtaaaactattcgaatagccgtgcccgcggttatgggcggtcaaccagattcaccgtgattagtctcaccctagtgtaatcttttgaatttggatagtttaggtggatggttgggcctgttgcaacgtgggataacgttggacagtggatagttaatactaattatatattacaactgcttaatctttcaacttctgtttattaatgctcgctttatgcaaaagaaccattttagctcttctttgatgattccctgcatcatgtctctattccggtatgacttgctgagtacagtgggtagtactcagtcttgctctacttttcccaaccccagagtacgagagtgtgtcagatgaaggtttctccaaggagtaggcttcgtccgtgccgtcgaggatgcctgtggagtggtgttcccgctgcagttctagtcaaggcttagctcctgttgtctttcttttcttccgctgcatttgtgtaagacttttatgatgtttgtaagacgtggatctgaatgtcaacattgtcgtttgtgtaccccggccggtcctggacggggattttaatgcacattctgcttggaattctactcgggaatttctgggcgtgacagccggggtcccaaacaaagttacaagcccagaagcccaagacaggtgatgcaacactttgtttatgtgattgcagccaaacgacatagaatttggcgatgaggctggatccgttggaaagagggccctgagagctttccatcaagtactcacaggccgaaaacggaggtcgtatgcagattcggcgactgtttgaagttagcagtgtagtaggtggccgaatcagattccagcacttggaggacttgatcttgatatcttcttggttgtatccgtagtagccatggtcacatcaggctggcttagtagttcttccttaatgactttatcctacgggcttaaggacttctgcgaacctcgtgagcttggtctagcaatgagggttgttgttgttgttgttgttgttgttgttgttgttgttgttgttgttgttgttgttgttgtttttgttgttgttgttgttgttataggacccgatttgatgatgtggatcgctgttgttgcgggatctgatggtttgccattgttgcaggaatcacccgcatagataattgataaatgagattgatgaaaagtttgtgaccttagccttgccggcatacaccataaagtgtgcttcaagcactgacgggcgtgggcattaaaagatttaaggcgtctgtgggtacaacgatgcacctctgcagagtgtgtgaattgtgacatgtcactccttgtttcaggtagaaactacgaacgcgacaggaaatgaacctatcggaggttctaatacatgtggtgccttatatataatagattttataattactttatataatcttttgcaacactgttttatggacatgcataagattccttgttgatttatggggctttggagatatatgtatatgcaggtggattatgggcatatacttattggattactatagttggacttgttgagtaccattggtgctcatcccctatatatattatccattgtagtgttgagctaacacttaggtggagaaaagcttttatataattgatcaagagttttagagcaagtttaatagtatagcaaactactagctccaaatcatctatagtcaatctaatagtcaattcatacaatacttaactacaaatgtatactatatcattaataattggtcccacatgtcatacacacaacgttttgaagtccgtgctgcagctatctacaaatctgtagcccgcttttcttccctctcttctcttatctcctccacatgtgtttatagttgacttataatctattattgtacttgctcttatatttctatatcagcaagaagttgaagaggatgaagaactagaagagcaacaacaaggtgctgttagggttgttatttttttaaaaaaagaaatctagtttctaatggttttattgatgggtttcactacaactgtttcttctatgctactctggtgtgcccatttctcggtaagttgattcttgctaaggaatgagccctattcttcctcggaagtggaatacgagggtcgctataatacccatgatttttgaaaaaaatagatatatgtgtagtatataataggtgtgtatatgaacaaaaaagaggagagaaaaaaagctatcacaccttcttgggcaaactgtcacaaatctgtctctaatgggccagccccacagtccatcacgttccaaagtccacagcccaaaatggaacgatgtgtatttgcattcacagttcatcgaggcctgaagcctgaaggctgaaggccagccggctgcccagccgatagcagcccatcgattccgatcgatcgacttgatcgatcaaattcactcgaagcaacaattccgattaccctcgatccgcgccaccgattggcgagaatccggacgccgggacccaagagaggagggagagcctccgatcgccgtgcgaccacgacttctcgaccgattgatcggtgcgtcgttctcgacctcaactgaccttggcggctcggggtcaccggaacacgcggctgcatacctacatcgcccaaatccctattcccctgcgaaactatgaaggtaaacgctagctttctctttacctggtcctagacccttgtcgtctcagcggctcagtcggttgacattagagatgtgcagtgacgatgattgtgtggttccaaccctaaaatgtcgtttttaatctccaacatgcttccaatttcttcttaaaatatatttggtgaggccttttttcttccggccggttagcttcgattccccatagtctccttgcgagttagatcctctccatcccgtgggcaggggcactgatctccatcccacaattggttaggaactgagagacctaccttatcattttaccattttccatcctcttttcatgtttcgtatgttgccactttgatatgttaagtaatcattagtacttctatatatgttaatcaattaaacactaaggtcagatcaattctatcaatatataaaccaattattagcacaaattgatattatatctactatatgttatactatcactaatgtgtgatattatatatacaagccaattattaagcttttgagtgtaaaaagaattttttatcttttcctattttgaatatgcaatctctaaatcctggaacatgggactcaatttctcacttcagtccaatatcatacatcccctgtcaagaagggatcgaatcgtaactctagccacaataaaaattgaacgacgagatgttcttcagtttcatcattagatttgccgattttcttctcctttcgttccacactgtaagatatatggcttctccattcctcatttagatttactaacatacatatatatacaactacacatacatttatctatgcattaatctattcaaaactaaaaatgtcttataatttaaaacaaaagagagtatatgaaatcaagctccagtaaattataactctattctttgaatgaagcttattgaggatctcaaaataactgctaaggacaaggttgagttttcagaatttcttgatgataatcctgaacaggaacactttcataatttccttcatgtcacaggttaacaaactttctgctaaagagtaaaagactttctgctaaagagtaaaagtcggttacaatgtaagacttcaaagttactacttctttgaaggtaaacacaggcggtcaaaaataagttttttcagataatcaatgactaaagaccagtgaaaatagtgtattcttcccaggcagtcgcaggcgatctggcttacaacggccacctgtgaaaaataaatcttcctaggcggcaaggttaattaaactgacagcctagataaggattttcggggtagaaaaaattacatccaaaatcaccaaatccacactcgcatttaccaaaaaaaaaactccaacgtaatggttaaatcaccaacacaaattccttgtgcctgcgatgatgcctgttgtcatcgcagaagccgttgttgtcaaccgcccaccatcattgccgagatgaaaaacatcatgaaagagtaatctaatcgcaccagctgcctagtctaaataaaccaggtcgagcagcctgctatacactctcttcgtctaaaaaaagatcaactttatattaggatatgacatatcctcttagtataatgaatttggacatacacatgttcatatttatcatactaggatgagacaaagggagtatgtatggtctgatcagccactctctagaacttctgcgatcagactatttgctctttcagtatgttttttgggccaacaattagggtgagtttgaacctatggattcaaaacccttatctcctagcctgcaaacgaagcattgaattagcacaccattaattatgtattagctaacgaaatttaaaaatttatattaatacgatttttagaacatttttattgatttttttagtttgggatgcgtgcgagtagaagctagaaaacgggagtgtagaacacaaccgtgtgctgggtcaacacggtccaggtagcattgtcatattacatgtgtcttttgtgttttcaagatggaggtgatcaccttctggactttttaggtctaaattcaattcacacattgagatataaaaaaacaaatttagcatatgaatagtagtggtactgttcatctgatgaatttttccccctcaatgtatggttgaatttggaattgatttttggtggagtgctagatgccactatactctacattatcattctttttcaattttgttatatattagaattgaatttggaagaaaaaggtgcacgacgagacatcccctcgagggattagaatccattcctggtgttgacttcagttaccattcagcccgatctaatagctgaccttttaaatttagtgttattgtgttcttacccctattttcaattgcaattctaattttacccctccttttcaaactttgtaattttgcccttacttttttaactaatgttgacgttttaccactgttttgttaactccccctcacggggttaactttagtggtaaaagacatgaatgtccatatttgccaatagttagatcagttcccttatcggtaaagaatcattattctatgatgattagatcatttcctacaactaaccatcaaaattaatcagcccacaattatcggaatataatttgaaggccacaaagtctcaagatcaagaggaagaaaacaaaagggtgaaaacatcacctagaggccacaatctccatatcaacagaaaggaaaacaaatgtgaagaggagagattgaagctggagtcttcgggcagatgcgaggtacctagagcaggcgatgcagcctcattttcctaaggtagagcggcagcaagcagaacacgcacttgcctccacgaccggagacgtcgtcactcctcctactatagcgccacggccttgcattgccccatcccctgttatagtgaccaccgtctcaggccgcctcaccagctgcacgcctcaagccccatgtcagccatcccctatgtgaagtgctgctttctcactatgtcaccgctgcctctacttggttagggtttgagagggggaacgggttagcacttagcaggggtgaaagtgcccctctctcacaagctccgcctcgccccgcgtgttgcctccaccattgccacttgccgccgggttcaggaggcgattaggaagactgagggatgtgaggagatagagagtggacagcggatttggttgaatagatgtgggtagaaatgtcctttaacattttcttggacaattttatcttttctttaattcacttaattttggcccactgtacatacctcaaaaccaagggcaaacagactgatcagtctgaaaagtagtaagggcaaaatcatagtctaaaaaataggggcaaaatcacaatcacaatttaaaacaagggtaagaatacaattgttccttttcattttggaaacttttgctattaaacatctcgtcttcgtggttttagcttctcgacacaacaaaaatcagagagaaaaatagtgtgcaaggtcaaatatgtccttggctccgcttcctccctctttcccctttctctatttaggctctagccaggtcaatgatcgtgccagcattcaaggggccaaggcccaagcagcccctcaagttctaccaaataatacgatatgttacaaaactttaaaaatgcataaaaaatcacatattaatgtgggaaaaaaagcagataagtacaacactatgacatgtagtaccacataaaattcaatgtacacatggagaaataaaaaagacaaattcatgtttcaaatagtgctcaaacagtctttgtgcatgtggtcacgctcgatcgaatgtatacaaatggagcaattgcagttcagcttttggttggatctagttctttgctggaaatggaagacaaaaaaggtgcaatactacaggtggtccggggcattctgtccagctcatcggttgcttcctccctattgttctcatagaagaaagaggcgcatatcatacttgaatccaatgcagtacagaaaggtcattaggacactcaaagtgcatatgcacgaatcatcctttactttacgtggtgggtaataaaaagtgaaatgcattatcggtacttaagtttgtaggctggtatcaattagatctctaaacttaaaaattacatgtttagatacatagacttggtttaatataccgcttctattgcaattgccctttgaccaccaatgtggcacttcacgcaagaaacactttcgcgctcagccccctccacatcacatcgcgtcgcatataccttcttgtagctataatgacacccgaatccacccccccaaaaaagaaatccccaaatccttcctcctctcatttttctcttaatttgtacgtttagaaaatgcatccccaattagcaactaccattggtctacgctccacgatgaccttatccttacacaacagacacttgatcaatggtaccttcttccgacgactacaagatgaggatgagcttagagaatccacgaggatgctgagcgtggaagccacactacgccgcctcccgccgctaaccagaccgcaccgcgccaccgctaacctcgccgcactgcgccgcttcctgccgctaatctcgccgcctaggccgccacaaccactccgcctctcgccactaacatcattgtcgaaatcctagccaatgtggggatattttgggggattcgggttggaatgcattggttagggtaagttatgtgagaagttatatgcaaagagggccgagcgcaaaagggttacctgcgtgacacgccacgttagtggttaaatgcagtcaaataacgattggactaggggtagtacattaaaccaagttcactaatataaacgtgcaattctcaagtttgcggaactaagtgacatcaccacacaaattttgggactagccacatttctttcgataatgtcctattataagatgtccattaagtattgaaaaagttttgaagactatgttaaagtttagaaccagagcatatatttttttaaaaaaaaattcaggaagcttaaaaaaaaccagagcatatattttcaggaagtattttttttcctttattaggcattcatcatgcctgaacggcttgtttttaaacaaattaagaatactagataaaaatattcatgatggctttatagtatggaaaatgttcgattcaacccacatgaggcatgttttaaagcaaattaagaaatactagataaaaatattcatgatggctttatagtatggaaaatgttcgattcaaccctccatctcacacccatgtggatgccatcccttgtcctagcacacgtctatgtaagattagaggcctagcctcgtaaagacgttttgatcaccattaaacacacgtacatatacatgcaccacctcacgggattaatacctccgtctcatattacttgttattttagattgtttggcatatgctaagatttagagtaaaagactataatattcttatcaaataatgcatagtcgataataggaggatgattgagggtagaataggaataaatttgaatgagatatgattgatcaaataatgcatggttgataatagattgtttggcatatgctaaggtttggagtaaaagactataatatttttatcaaataatgcaagatacgataagtagtattttagaataacaactattgtgagacaaaatttaaatggtaaagagacaactaatttaggatagagggagtgcatagctattatatatgagcacccatgacaattgaacccaagctggggaagttaagggccgtatcaactgataatgaactgtcacagttggctactattaaacttgcctataagaataattatatgtagtgttaacttgtactcactttgtttaaaatataacagtctaatactagattgaacatagcctagtactccctccgttcgtaaatataaaggattttgactttttgattgcaccgtttaaccattcgtcttattcaaaaaaatttggaattattattatttttatttgtgacttacatattatccaaagtactttaagcacaacttttcgttttttatatttgcacaaattttttgaataagacgagtggtcaaaccgttgcacgtgaatagtgaaaatcccttatattcatggacggagggagtgttatgaatcttaacaaaatctgtctagattcgtagtactagattatgtctaatcgagtactaagttggtattaccttcatctcaatataaatgcaacttaaaaaattatgacatatcctaaagactacgaatctagacagctgactatccaaatttataatcttaggatatatcatatttgtaataagttgtactcatattgggatggatgtaatatattttaggagggaaaagtgtaagaatcgtcttccccacggtatcccttgatcaaaatacttggagcttgaccagttaactcatcatctctttccttctgcatccttttatatcacaacaaaatagtaccgtgtggcattgcagcatatactatcatgtttcatgaaaatgtcatttggggtctgttcactttgatgccaaaaaaaaccttactaaattttggcgttgccaaaattttggtaacttaccaaaattttggcagaatttcttatatagttatcaaaatatagcagcaaactaaatgtagccattttttttaactttatcaaaatttggtaagattgaaaatggaatcaaagtgaatagtcccttggattgcaaagtacaagtgggctggcgtggagttgggggccttgcaagttgtgtatgtgagcggagaggggattagggatatgcatgtttcgtagttgcagcagttcgcaacaaacttcagatacaatgagagaggaagaaaaagaaaaggtcaaccgattcttacaagttactcaatccgttctaaaatatataacttttaactcttagaatttatcctaaaatataacaacttgttcaccaacattctcttcccaaccaaccacaacattccaccattcacttttctcacatatcttcactactcattcaatcacaagactccaccacttacttctatctactttcttaataattatgtccaattctaaaacttcttgtagtctgtgacggagggagtaccattaagaacaaagtagtactaattggcaacattaaacccttgagattctcctctacggatgagcacgattgccgtctcgagttttcaagacttttgatatcctcattaactgcaggattcctctacgcacacggacccctcttgagtcttctgaccaacggcaaacgggacgggaggccgacaaacgcgaccagaaagtcatcagaacctctgctgaccgcgtgtgtgcaacttggcacttggcaaagcctgcatctctccagaaacgggagacgaatccaaccgcagaacggagcggagccagccggggaagtcccgattcccggtccaatcacacgcgcggccgcccgccccgcgccccgcttccttccgctttcgttatgtccacctaacgtgcccacgtctcatctacgattagcacactggattatctacgcccatgtccccttccccaaatattgtaaataaatatggatctatatataattccccatgattagtagcaactagcaagcgcgcgcccagatgccgcccacaccggttgcctttccatgccttgcaggtgcagctccctaataggttcctcgtcttcaaaaccgatgtgagatgtgagattagatatatcgcacaagattatatatatataaaaaaaaacagaggagagaattgaacaccagcatcgatcggtgcagccggcatggtcaccaagaatgttcagcagcagcagcagcatcgtgtagatgtagtggtgcctgttcctgctatggtggtggcagccatggcgagcccctgccccgccaataagctcctccgcggcgcaatccagctcgccttcgggttcgcgctcggcatcgccgtcgccatctacctcattgggtcagcgacgcctgccgccgtccccggaggatcatccctcgagctcttcttccctctcccgccgccggccgccgcgtcgacggcgaacctgtcggcggtccggcagaagcagccgccgactccatcgccggaggcggagaagacgacgacggcgatcaagtcccagtcgtggccggcggacgacgcttcaggcggcaacagcaccgccgatcaggcaggcggaggattcgtggatattagcgacgaggagctgatgaagctggcggcagcggcgccgagggaggtgaggacgggcggcggcggcggcccgaggccgaaggtggcgttcctgttcctgacgaggtgggaccttccgatggcgccgctgtgggagaagttcttcgaggggcaccgcgggctctactccgtctacgtgcacaccgacccggcgttcaacggctccgaccccggcgaggcctccgtcttctaccgccgcactatccccagcaaggtacgtctacctaaccatacacattgcttaattatcatgtacattccaatataattacctgataataagcacctgattaaccaaactacacccattgctttgcatatatattccacgtaattacgcaagtactccatctcattattctcatatccacctgatatttaccaacttaattactgcattcatgctaccaaaactcgataatttttgggaacgaattgtatatacgtcatcgtcgtcatcattgtggtcttgatgattactgtaattttttgttcaatgtcttcgatgcaagatctcggccaggacctcaggcaattcgtgcgtgcatttttcacgcatcagctacatgcatgtacgtaggccctgcgagtgaatttaaaaaagattgtaggtcctgtggaatgccgaatgcgtgcgtgggtggcttattcatcgtgtgatggattctccaatcaattaatggagctcaatccggatatatatacacgaaaagcatccaactgtagtactagatcaagctaggtgtcacagccgtcgctgcctgattagttgtttgaccagttaagcatgcgtcttggcgaggtaaaggtctaaagcgatgtgtgccagttgttgattggcctaagctggaagtttctttagtttttccagacaagcgaagggcggaaattccaaaactgtatccgagtgcgatgcgtgtcctaagaaactagacaagtggttttgatcgttttctttgtttggacatacgactagtctactagtactgccttgaaaaaaaaagggacaattattagcaatattatttttccaataaaatacgttgtttctgtgcatcctgtttgtcgttgtcccatactctccagcatttctcacgtggagttcattgggcggttcgtagatcctgtttgcattgcctcctagctgtcatcggccgggcggctagtggcgtcctgttcgtgctgagcacttgctaaatcttgcagctagctgggccgccgtgctatgctactgctatttagatttaataaagatatataattctttcgtcgtcatgcatatactacaaaagaaggaaccttaattactttgccaccataacgtacttattttatttccgtttaatttgttgttccatcgatacatttgttatatatgtatatgtacaataatatacataatatatatgtatatacaggaagttaaatggggcgagataagcatggtggaagccgagcggcgtctcctggcgcacgcgctgctggaccaggccaacgcccggttcatcctcctgtcggagtcgcacgtcccgctcttcgacttccccacggtctactcgtacctcatcaactccaccaccaagatatacctcgagtcctacgacttgccaggcgtgacggggcgcggccggtacaaacgcagcatgagccccgtcgtcactgccgcacagtggcgcaagggctcgcagtggttcgaggtggacaggggcctcgccgccgacgtcatcaccgacgatgtctacttccctgtgttcgcgaggcactgcagccgtaattgctacgccgacgagcactacctgcccacgttcctgggcatccgccacccgtcgcgcgtcaccaaccggagcgtgacgtgggtcgactggtcccacgggggcccgcacccggcgaggttcacgaggatggaggtcacgccggacttcctccggtggcttagggccggggccgggactacgtgcgactacaatggcgccaccacgacggtctgcttcctgttcgcgaggaagttcctgcccaactcgctcaccaggttcctcagattcgctccaaaggtcatgggctttggatgatgatgtgcagcgaacgttttaatatttagctaggatatacaacttttcacattctttggtttgttttattcgcctattccacagacccaacgtatacatgtacgtaaatttcattttccttttctttcttcctgatttcattatgtaaagaccaaatgaatgtaaagagcacaaggaactatattttttatactaaccacacatggaatatagagtttattacacgccctcaattactaggtctgtctaaaaaaccactcgtcaaatataaaaccgcatattttcttaccactgtagaagatgatcacgtctcaacagtacaatcatatgaatgacgtatcctcgtcaatcatatgaatgacgtatactgaaatgctatcttggggtgtcgtgaatacatgtacactcctcaacttacaaagacaggtgatgtggatccaaaagccgaaccctaaggccatgtttagattcaagggtgaaaagttttggcgtgtcacatcggatatacggacacacatttaaatatcaaacgtagactaataacaaaacaaattacaaattccgcctgtaaaccacaagataaatttattaagcctaattaatctgtcattagcaaatgtttattgtagcatcacattatcaaatcatggagcaattaggcttaaaagattcatctcacaatttacatgcaatctgtgcaattagttttttctatatttaatactctatgcatgtgtccaaacattcgatgtaacatggtaaaaagtttttgtgtgggaattaaaaagggcctaacaggagaaactaggttgttaaacccacctataacctcaaagaaaaatgtcgacaaacggtaagaaattcagctaaaatcatgtaaacttggggtgttgtccaacattcccgatcacccgatgaaactatatacgaaataatcaaagtatgaggtaagcaattaatttctacgtgagaactcgcatttttttattgaaaaatactaactgctactgtacaagacgagcgttggtgatccaccccaacccatcggccaaacatggcacataattaaattgaatatacacatatatatatatatatatatatatatatatatatatatatatatatatatatatatatatatatcttttattttgttttcttgtctttttttatccttctctacgactactggagctgcaggaatgctgaaccactactctcttaaccttctggtccacctttctgtgcttgctctccttggtggggagtggttcgtgaatgcctccagaaacatcatgaggacaagcaaccttgtgggcacgaatgcaaggcacagagccatcactaccagcgcaagtatagctctatcaatggcctgtgaaatatggcaaccaaaataatgtaggtaagcgaagggacacgcacatttgcaaggttagaacaacatattggggatattgctataatatctataaatcgcaagatagcatttgctagcaaatttggcaatggcaagatttgcaattgccacagcatagcttttcatcatactttttgaaacgtaccgtgtgcgctagaacggcacaacacatcatttgatcaaatagtcacacatttattaaagcttttatgtttcttttttttccttttgtctttgatttagaggcatggctaggaaagaaacatcgcaggttgatgcattttttaagattgtttcaggtgtcattgagaccctgaaacaaagggtgctatgtttatcttttacaaaccactagatactgatagaacggaaaaaaaacccataacatttcctataataaataaaagcatatctctataagtgaatggtgaatcccaaaaatcaactaggatgagccacataatcaacaaaataatagccattggatttacatgaggacaaaatagaaagaagaaatatgagccattggattcattggattcactttgtctagaagattccttaacctactgagaaaaaatagtaaggttatggatataattttacaatgtacacttttaattaaaaaaaccattttgcaaacataccctcttactctatctatgtaacttcccattgggaaaaaaattacaaatagatcattgaagtatattttgaaagatccaacagtgaattaaagagtaaagtgaggaaaaggtagtaatgttgtgcatataattttacaattctcacagtttacaaataaacctaatcttttaagaaagattaatataatctgactaagctttatatcatttgaagttatatatattagtgatgagcatatatatgtgtgtgatactaatgtaataatcagctatgcacccgtttgttatgagtaatcatcattgcaaatttaagcttattattaataccacaatctatagacgcatttaggccctgtttatttccgcttaagattattgtaatctagattatagaattagattactataagctagattataataagtcgacatagaataagctgctagctgtttgtttttctctggattattagctgtttgttagttgttagccacccaataatctaaaaaaagcacctttagagtggcttactagattatagtaatctggcttatagatagcaataatctatcataataagctatctgtttgtttcagcttactcttaataatccagattataataatcctaagctgaatcaaacagggccttagaagagatagagtttatagttgcgcaaatccgcaacttaatatactactcaaagtctgaggaagaacatgagcagcatctttggttagtacttgagaagctgaaggagcactagcagtatgccaagttcagcaagtgtgacttctggcttgaggaagtcaaattcgtcggtcacatcataaatgctcaaggagtggtagtagacatgactaatgtggagtcagtcaccaagtggaccctactgaatacaatctctcagatccaaagttttcatggactcgcgggttattaccgttggttcgttgagaatttctccaagattgctaagccaatgatccaactattgttgaaagatgaaaaattcaaatggtcagtgaaatgcaatatgcttaatagtgggctgttggttcatggttttgatagacgcacccatggaaattaaggactagttcgttgcaaatcctgggagacttaccatgcgtacaacaagccaacatgggcaatgactgggcttgtagtatagcttttccctttctgatgtacctaggtgaggttgggtgcgatggagattggatggaccgggtggcggtatatgcggcttccggattcaccttggcacaagagggggctccctaccttggttttaaggttatggttgaaacctgcagtgtggtgcttttggttagagggagttatgcgaaggatcctgtcagagttcctttctggtatgtcgtggtgccatgtcggcgcacggaaacatgttgtgcggttgtgtcttgtggatacagttgtacacctctggctagagtagaactattcgaatagccatgctcgcgattatgggcgataaactagcttcactgtgattagccccatcattaataatttgagttaatggaacttgtgaaatttaggtggatggttgggcttatcacaatgtggtttagcgttgggcaagaatgattaatattgcataatttacttcaatagtttttctgctttcaactactgctttataactattttatgcaaaagaacccctagcctccttggaaatccttgcgtcatacctcctcttggtatgacttgctgagtataggtgggtactactcagtcttgctctactccccccacccccacctcagggctggactactactcggaggagtaagcttcgctgctaccatcgaggatgcatgtggagtggagtcgccacgttgctagcaacagttatcctaagtttaactagctttacctttgtgctgaatttgtaagacttttataatgtttgtaacacgtggatctgtatgtcaattttgtcgtttgtctagccgagctaatcccggctaaggctttaatgcacattctgcttggaattctggttcataaatttctgggcatgacaagttggtatcagagctgaccttgaacgtaggacaagccaaatggaaaccctaagagtcctctaaaaccttttcatcttcatatgctctttgcacgtggatttgtttcgagaaaattttggatttcgtttccttgattcatgggaaaaatcttggtcgcttattcaagtggagtttctcgactagagttagtctagggtattagtaacttttcggtcaattaattcagggattgttggtatttcttaacgacattactagaaatataattcccagcaatggcgtagaaatacttatggtatattatggttatagagttcatccgcaagcgcacggatataccattgtagcatttcacccaagagtatttcaacggtatcgtatttagtttatcccgtgggaagatcatgtagagagaactttgactaataatttatatattacttgtgataatcatattctaagcaggggttaagataatccaagggtagagtgacacacaagcattaactactcattctcataataaatcatctaagctaagtggaaacaaaagaggaagaaaatctattcctatacttctaatatacatagtatacatacattctagttaaccaatatactagctaataccctctatccgatgccctcctggtacttcgagaagccacccctgactaccgagttccttacgacaacccgtcatggctatacaaccggggctaaatagggaggaataccctccccagggaattaacttaggattttataccggcgtggaggaatacccgtactgagctgtcaccatcagcggcccacctctcatccgtaatatataaccctaaataatgatatcccgtaatctagacaccacgcctaaactatcagatactactctaatatcatcgtcatgacatagagtaattgcataagcaaacatcatacccgcaccaaagcatctcccagataagttagccgtatattcagtataacatgaatataatgtaaagtaggtactcatatactcggaaagtatttcaataccataaagcttacaaaatagaagagaaaagctactagagccatacctgaactcttccgaaggcttctggactcctgatttctactctattcctattccaccagctagatactactaaactaaacttgagagaaatgagagagctattgcttgagctgtgtgagtgaagtgaggatgagagctccttttatagcctcccaatgacggttgtgacggttggaaaggtcggtaatacccaccaaccgtcattggggagccatctcagccgtccaggagaaccctggatcaaacggagctgcggggggttcggctgaaccatgggctggcccaacccagcccatcttcgactggcggcctcctttgttgtcctccttcgtagacttatgaattttggcccagtgtgtcgtgtcatttctgagttcttggcccattcatgcataagtctggttctcgacatcgtccgattgatttatcgtctgtgttaatgtcgattctcctccactttagtgtcattctctgcaaaaggttagtatacctaatactagtggaatattattattctaacatatttatgcattgcaagcatcactagttctcctctattttggtaatattgatggtcgaaactgatcgataacgaccgtcaacagagaaactagccgtaccagcgccaccgaccttcaagactatggcaagcaagactctctgcgaattcgctactccctctgctgacaatgtggccattgggccgcaaatcaacatgggagatgtggatttcgacttgaagtccagcctcatcacgatggcgcaggctagcctgttctgtggcaagcctaacgaggatgccaatgctcatctgcaacagttcttggagatctgtagcacgtacaccatcaagggcgtcagtccagacgccatcaggctaaggcggtttccattctcccttctcgggagagcgaagcagtggttctatgccaatcgtgctgctgtcaatacctaggacaaatgctctacggcattcctctcgaaattctttccgatgggcaaaaccaatgcccttcgtggaaggatttccagtttccagcagacaagggacgagtccattctggaagcatgggaacgactgcaggagtacgtagccgcctgtcctcatcatgggatggacgactggctaatcctgcataatttttacaatgggctgaccccaatgtcccgtgatcacctggacgcggcagctggaggagctttcttctctaaaacggttcaaggagccgttgatttaataaagaagatgctctccaacatgggttggagcgaggaacgactccagacccatcagtgaggcatgcacaccgtcaaggaaacggaactgcttgttgccaagctggacctcctcatgaagcgattggacgaccacgagaaacggccacaaggcaccgtcaaggccttggactcacacgctacgtgtgaggtctgcggcaacacgggtcattctaggaatgactgcccggaaacccgtgaggaggcgatgtacatgggcaacaacaacaacgggtaccgtccacaagaaggtcaggggtggtacctaccacgcccatattatcaaggaggtaataacaacggtaacttttctaacctgccctccttgaaggatctagtttttgcacaagctaaaaccactgatgcgctaagtaaaaagcttgccgccaatgataagatcctagagaacattaatgtcaagttagatggctttgcttctgcttttcaaaaccaaccgagctttaacaaaatgataaaaacccagctagctcagttgtcatccttagttcctgcaaatgaaactgggagaattctggggcaacccgactcctccgttgagcatgtcaaggcgatcacgacgaggggaggtaagtccactcgtgatccgacgtatcctaaccctgcaggaattgacgggactgcaaaagaagcaccatctaacgactcggctgacaaggaagttcagccagaaaagaccgtgccgcaagagtactgcgacacaagattgctgccgtttccaaaacggagtaggaaaccgtcagtggatgagtaattcgctcgttttgttgaagtaatccagaaaatccacatcaacgtgccgctgttggatgctatgcaagtgccaacatatgcccattatctcaaggacatacgcaacaacaagagaccgctcccaataacggaggtggtcaagctaatggagcaatgcagcaacgtcatactccacaagctcccggagaagaagaaagatccggggtgtcctatgatcacctgctcgattggggcacaacagttcgaccatgccttatgcgaccttggagccagtgtcagcgtcatgccaaaggacgcctttgacaagctcaacttcatggtgttggcaccaacaccgatgcgcctacaactggctgactcgtcagtccgttatccggcagggatagcggtggatgtgccagttaagatacgggatttcttcatcccggttgacttcgtggtgttggacatggacacgggaaaatagacgccgctcatcttgaggcgtccgttccttagcaccgcgggagccaatattgacgcgggaacggggagtatccgtttccatatcaacgggaaggaggagaagtttgagtttcagccgaggacggaacaatgctccatggtcaggatcaagtacgggccgaacccgcagaatattcaagtggtcaaagtggagccacccaaaacggacagcctggtaaaatttatgcagaatttcctggagaaggaaacaacgatgcccaggaaccgttattggaggacgccagtaaaaccatccataccgcccaagaagctagagtagccggctcagaggaagccgtcttccgcactaaagccaaggaaggtgtggaaggaaaagccaaagacgcccgctccatcacctccggagacaggtggaaaatccacgaactaaatcggaaggaggtacggtcttgcacgtcggacctaaaatgacgcgacctttgccaacaggtaaattggtatgtatctgcatattttctttcaccaatttgaatttttgcatcatcacatgtttgaatttcaaaattgcatttaggatttattttgaattttgaggaaattcttcaaataaatttttcagagcaaaccaaaataaaattttcaacgaaaattcactatgccacgaccacactgaccgttcgaatccaacagccgaaagtggggctggttgggaccaccaggggttcggccgaaccaactaggcaacggtcggctgcctccctttttgaggcaacggctagtgggccccacaggttagttttgaccgttgtgggtgcactacttaagccaaccggccgggagagtgaattccaccccatttcaacacatttccattccctctccaaagttttctctcaagttcattcaagttttgatagtttccctcaattttcaaacattagttgcatatatacaagttgctttagtgaaacaaaccggcgggtgaatcttttgctattctaacccccgccgagttagtctgttcttgctccattgtgcagaatggggaggcgattgtctcatctgttcaaggggtccgactcttcatcaagtcgtcatgaggagtctagtactcgttcatcaactgacgtctcgatggaagacgccaaagctctgctacgactcttgaacgacaccgacctcgaccttgtcagtgatcgggagagacaagcctactacatgctgagcgaccgggagtatgctcacacgcgagaatactcaccggagctgctaaaaaaaaggtatggatgttgaatttcgtgctatttcgaaagctgttggttggcagagatttgctgtggtagatgagcatggttctcgtttgcttactttgcaatttctgtacactttgaaagaaatagaagatggaatttcctttcgctttttccataaagagtacacacttacatggaaaggcttaagtacacgtattggttttcacgattcctgtaagatcgatctccagaaaggaatttctgggttcgagaaaaaataggttttgggaagatatttctggtgctccaatttgcaagaaacctaggacgaatgatatccataatcctacacttaggctcatgcacaaatggattgctatgactttgtttcctagaggtgatcttagacccattaggggggatgaattgattatcatgtttgccatggttagaaagatcaaaattgctcctgtgaaaaatgtatgataaggcaatggttagaaagtacaaagttctctgctcctgttgagtgcacttctctgattactcggatagcaaaagggctaggggtcgttagcgaccaaattgcttttatctcagctgctcgtccgtgtgttgatgagacttatctagtgcaagggcatattctgaaacatggagtagatgggtctttgatttacctttttcccggttgtacaaatgaaatcccgttgccaaatgcggggtatcatttgtacaactgccgtgaactaatcattcccctgcagaccatagaagaatctcgtgcaggtggagcatacagggagatgcaaaacatgacaaggaacgaacgagaaagttcatcatcctcaacacccgtgcaaatgtataaggcatgttgggagccaactggggatgcacccggatggacccaagctccatgccacagcatcggagtctcaagctgggcaagtgccagtgaggatcggtggcgtgcgcctcatgacatacattggggggacgaccaaccttctagatcaagtggtatgcctccatctccaagtgaatggcgctcaagttcctctcgtagggacttgggtgaaatcactaggagaatggacacccttgatatgcagacgggagagatccagtacaacctcacggaacacatagcacaaatgcaagaatggcaacaatctgctgatactcagttcgccaacttcaacaacatgatgcagcaacagcatgatgaccttcaagcgtactttcgctttcaggggttcaatccttatcaaggaccctgagtgaaagccaagcttggggggagacatttctcccccccaactgaggtaacttgtatcacattgcatatttccctttccaattgcatatttgctttccaattacatcttataaactaaaaacaacataaaaatttgcaaaatagaaaataccaaaaagatatgataggtttgagtcatgctaagtaagacaagctagttctctttgttgaaatgatgaatagttgctctgttttatatctcttatatatgggttcatggtaagtgctctctcaaaggttaaatataagtagccaacaattatctgggaagctgaggtaaatgagctgtacttgctgatctgagtctaataagttgtaagatatgaggtggtaaataagagttgctatgatcctgatactagtttggtttgaattcaggatgtttgtttttcaaaatgataaaattaagagttcctcatttgatgaaaattcctaccaaagcaaaaaatgtgccgtcatgattaaaccatatacattttggttgcttgcattccattgaactttgtcaaactcttgagacttgtgtagatacttctcaggctctatgatcaagatcatacacccacatattaccaccaaaataaattctccatactgggagctatgcaaatattccatgccactccatctccatattaccaccaaaataaattctccatactttcatgtgctttcttctcttaaaaaaaaggtcctttcaaaaaaaaagatggaggaaaaggcatggtgatgaaaaaaaaagttatgctctcacaagcatgagcatgatgttgaaaaaaaatgtgtaaccatgccctctcctaatcaataaaagaaggatttttgggagaagaaagtaagcacaaaggagaagcattttctttatttttcctcatgtaccactttcatcatataccacacacacattgcatgatcttgatcttgagtatgattagttatttgctttagtctaagtttttgacttagtaataaatatgaatgcaagtatgccatgtttggttcctaccgagctccacatatcaaactttagagtaggaataaaaaaggcaacatttggtgaggaattcaaattgatacacttggagagactgagtgaatcatttgagggacttgggtttcttttgcaaaaatcatttgaaaacttccggaataagagttgaataaatattgggtgattagtgctctaaattgttgttctgtctttcaaccgcccaaggcaaggagaagcagtgtctcgtaggaatcatgggtaagggtaagccaccgtgccaaagattatttaatctgagagaaagtacatataccttgcacctgtatctttgagatatgcaacatagtagcaactcctgatcaacaaccaagtctttgtttcctttcgtccttcactcgggacgagcaaaggttcaagcttggggggttttgttgacggttgttatcgatcagtttcgaccatcaatattaccgaaatagagaagaactagtgatgcttgcaatgcatataaatgttagaataataatattccactagtattaggtatactaacctttcgtagagaataatcataaagtggaggagaatcgacatcaacacagacgataaatcaatcggacgatgtcgagaaccaaacttatgtagcgaatgggccacgaactcagaattgacatgatgaatcgggcaaaaattcacaagtctacaaagtgaagcaatagagggggtcgccagccaaagatgggctggtttgggctagcccatggttcggccgaacccccatctccaccgttgaggctagggtttggcgtggacatccaggattgcatcccaatgacagttggagggcacttcggacaattccccttccacaaccgtcatacatacctctatataaagacttcaccttctcacttcacacacacacctcaagcaagagctttctcatttctctcaagtttagttttgtagtatctagctggtggaatagaaaaagagtagaaatcagtagtctggaagccttcggaagatttcgggtatggctctaatagctttcctttcctcttttgtaagctttgtacttttattagaatactcttctatatacatttatggtattgaaatactttccaagtatatgaatgcctactctacaatatgttcatgttatactgaatatacggctagcttatctgggagatgctttggtgcgggtataatgtttgcatatgcaattactctatgtcatgacgatgatattagtgtagtatctggtagtttagacgtgctgtctggattacgggatatcattatttggggttatatgctgcggatgaaaggtgggacgctgatggtgacagctcagtacgggtattccttcgcgcctgtatataatcctaagttaattttctggggagggtattcctctgtatttagccccagttgtatggtcatgacgggttgttataaggaactcgacagtcaggggtggcttctcgaagtaccaggagggcatcggatagagggtattagctaatatatcagttaactagaatctatgtatactatgtatattagaagtataggaatagattttctctcttttctttccacttagcttagatgatatatcatgagaatgagtaattaatgcttgtgtgtcactctacccttggattatcttaacccctgcttagaatatgattatcacaagtaatatataaattattagtcaagttttctctacatgatcttcccacgggataaaataaatacgatacccttggaatactctcgggtgaaatactacaatggtatatccatgcgcttgcggatgatctctgtgaccataatataccagaagtatttatgtgccattgctgggaattaattttctagtaatgtcgttaagaaataccaacagaggcaaagaagaggatatcatcggctgcgtaaacactgatctggacgatgactttgatgatcgaaaaagcacaagcgacatggcactctacatcaacgattgcctggtttcatggaacttgcagaagtagaaggccgtttctttttcatggcggtgactgcgatagcgtgctatgaactttggctcaaggcattaatggccgagctggtcaggatagaattgaggtcggagaagtccaccatctcatacttgtagatacattgaaacaaggtatcacttcatctatgaatgtgttgaaggtagatagatcgccattgagtccattaccacagatgagcaatgggtggatgcactgacgaaggtgctaccattagcgagggcagcggctatgtggttcctgcttggggttcgcgatcttggaccacaataggactgttggtatttcttttgttattcttaacaacattactagaaatatgaattcctagcaatggcgcagaaatttgcctgttatatttatggttacagaagtaatctgcaagcgcacggatataccattgtagtatttcacccggaagtattccaaggtatcatatttatttaatcccaaaggaaaatttataagagagaactatgctaataatgtatatacgttacttttatatatcaaagtctaaacaggggttaattcagttcatatgggtagaatgacacaaagcagaaggacttagattctctcatttaaataattgtagactatgtggaagaagaaatagaaaggtaatcatttctatactttttatacacactcaactttagcttacatttgctagtatacacttatgttaaccaataccccttaacagtgccctcctggtgtttcgagagaccaccccaggattccgagtttcttacaacaacctgtcatggccatccaaccgggctaaatacggaggagtaacctcctaggaaagtgtcttaggaatatatactaacgtcgaggaatacctgtgctgagctgtcaccatcagcggctcacctctaccgtcccgtagcatatatgcctaatcaatgatatctaacaatctaagtaccacgcttacattatcaaatactactctataccctcgagaaaaatatagagcaatcatttgcatgaacattaaactcacaccactgcacctctctggtaggctagtcacacaactatatcggcacaaatataaagtaaaaccagtactcagataaagtaaagtactgaaagtatataaagaaggatattctattaattccgaaagtcttacaaaagaagaaaggaaagctactagagatatacccgaaaccttccaaagactcgaggacttcgagaactattatattctactccacttacctctagagcactaaactaaacttgagagagagatcaaagcttcttgcttgagtgtgtgtgtgtgtgtgtgtgaagtgaagcactccttaaataagcatgtatgacggttgtagagcatgcgaaatgtcggaaatgccccgcaaccgccatcagcaagcaatcctagacgtccatatgtaaggccgagctgaacggccgctgccagggtttggctgaacatgggccagcccagcagggctccaaattcgggcagagagactaataggtgggtcctattgacggttgtggtacttatggcggttttcaggacggttacacctgacatgtgggtccctctatccttgagcttgcttaggagtgagttttccttcatttcttcttcatttatgtgctaatctctgcaaacaaatagtactccaagtacaagtagaaatatattattctaaaacaaatatgcatagcaagtatagctagttctcctttatttaatttatattgacggtcaaactgatctataacgaccgtcaacaattactcctggttgtggacttgtggccacatggcattcctattggtgggtggttgcaagtggccacatggcattctgtaacaccctagaaaactacataagcctgagatgccactaaagaacattactaaagtgccaaaataaagaaatttcgacatcatctcttttaaaacaaaaagatgatatagcgcaagcatcaatatataggttatggttatgatacaacaactgactgacatgtagggatggcctaaaaaaagttagataatccatgatcaacaactctagtatttaattaactcattatgtctaaacacaagtaatcttgtcagcatactacaacattcataactaagtgagatcatgtcgtgcgatagtgcagttaataccatcccttcatgcaaacatatctgaccaagtacttgaaaaggctataaggtggtgagaatgaatctcaacaagcaaattgttttaacaagttatttaaaccacaagttcattatgtaatgggttagatatagggctaagatgtgatataaagacaaggtaacatccaagagcaaaaatctcatatcatcatcaatgaaagtagattcactttctctcaaattatacagatgcagacactcctcaatgacaacttcgatcacttccatagcaatatgcaatgtgtgcatatgtgatgcaatgatatgtattcctgccttcacacccaataagatgtgaagctgcatcatattatgtcaatatacgatgttgtaccggtacattcgcaactataggttcgcgagataactccaaatgcaatgcaaatataggttgaattccagagtaataatatgaaaactacattccttcataggaaaacaatatatcattattctcaccaaaagcataaaacataaccataaacaatgtaaaatcaataattatgattcagataggtaaatcctatgtctaacatataataatatcttggttgatgatatataatttcaaagtggatgtagaacaaaataacatgtcaaagttgtagcaaaccaccgctacgtttacttgcatctaacaacgaagagatgataccaagcatgatcctaagcaccaccacctatccacaagtcgacctcagcatacgcactcaaacatgcatataaaacaatgaaaaaaaatgcacatgcggccccgtctcatcaaaacgtaatcacaaggagcactgcttagactataaataatagtgttgcttcaaagctttatatcttgaaatataaaaaggctatgactgcaaataaatatattttagaaaactacataataagacctacaacttttacatagaaagcatatttttattttgccatttaaatagtgtaatccgtgcttgaaagcaggcttcagaatctgcctacaaaaatctgacagccacattaaaatagttatatctagcgttctactcaaccaaacaacatatattttaccaatatggaaacggaacatatcctctgcacacaagcttcccatacacactctgtgcacaccaactaacaaatatcatagaaaattctagaaaaaaattagacacatacttccaatagtattacaccaacatgtgaaatcttatcttcaaattcattacattttagcagtaacaaaaaagacaaaattcttatagacttttaccctaaaaattgtcaattttttcacttttttgttacggctaaaatataatgaatttgaatatgagactttgcagatacgtgtaatactattagaagtaaatgcccaattttttcatagaatttttcgtggcatttgcttggtggtgtgcacggagtgtgcacgagaagcttgtgtccataggatatgttcccatatggaaatactaagaaaaatctctataactttatctataggcggcctaactgattccactgtttaacccctccaaaaacagtttaatctactgctatccaaattatgacataaaaagcaacaatcatactaaaaaattcatatcgcctaaacaaaatgagataaaatcgcgccctttggtcagaagataggtttatgcattacctacaacttcctagttatacagtacttttgtagaaaatattatttagacccccaaaacatcaaaaaacggaaacactgtaaatttgcccacgtggagcactaccaaaccgaaccaccacaatcaaaaccccttctctaaccttcacttaccatgaattaaagcactataggtggagatctagggagagcaaggtttgatgcagagaagagggagaccaaagtacgagggggggggagggaatccggtacctcctcctctagggttttagatgggggtggaggaagtgggttggacttcttgggctttggcccaggttggttgggcccatgacttaaaggtattttatttatttatttattttgatgctattatattgcaaagcaatccgaaaccaataaatcaaacaatttcgatttattttttgtgagggtattacacattccacttatgagattcttttgcatgcattcttgagtggatgcattagtgagtatgtttcacatgcatttatgaatgtgtgtgtgtgtgtgtgttttgcatgcatgggtgaatatgtatgcgttgtccctgcacgggtgagtgtgttatgcacagatacttaacttccatacatactacaaatagtagcaacttccatgctatagcatgtattaaagagtcatggagttgtttccaagaaggaatagaaaccagaaaattgttcaaaaaattcgaatgctgtttctttgttttgttgttgtgcgctactaagaatttcttctcactctactgcgattgttgtgactttgggtgtgtgatcctgtgccaattgccagcgagtttgcatatccttggcaagtatatggagaggcacatgcacgagttacttgttgatcaccaactatatcctaggttacttatccgtggagaagaaattcttgtttgccacagagtttgttatttgtggagaagaaaaatatacgcccgcacctccatatactatcaagattttgctacatggagatttgttcaactagatgctcaaaggattgaatagaaatagtagaaagccaaggattagttcaactacacgcataggcatcttttgtagtaaaaagaaagaaaagagagaggacaagtcgaggtgacatgcgtgtagttgtgatcggggcatcgcgcctaggatagggcaacgaccacgacgtgcaccagcaacctgctacttggccttctcttgctcgcgttctgggcttgcttttttctctcttgttttaatgcattatgggttaaagatggtgcactatcttggaccaaggggtttcaaatatggtaaaatgaggtggtggggggggggttcaaccccatcccctccctaactgtatttgttttggcagataatagaaccaatccaaatatctagtcattactccattatataagttaccaaacatctagttaatatttcacgtgtcatttcctgcatctatctttgtttttctcgctgctagttacccatgcatgcatgcatcccatgctttgcatactattatatatctatgtcctttttacttcttaaactatttatctaatttacgattcaattaaatcgtcgtattcatttcaattaaacatttataacaagatcttgcaatgttatatttcaattgtatttttaattgaaacatttttgtatgatacgtgaaatatggagttgtaactattgaaacaccataacatacttgctgaaacaatacaagaacatcgcttgcaacatttgcaaattaactaatgacacattatgagatgccagttgaaatatccaaaagcaccacatgcaccattgaaagaagattttctgcaacacaaacctaatatgtacttcctctgtttcatattataagactttctagcattgcccacacatatatgttaatgaatctcgacatatatgtgtgcttagattcattaatatctatatgaatgtgggcaatgctagaaagtcttataacctgaaatggaggtagtacaacaaagtcaaatcgctagtcaaatcgctagttgaaacattttctttaaacgtattatacatcgaatatcaaaggcgaaaacatatatattgttttcattaaaatatacgagatttaattataataaatacaacggtgtgatcaggttacagattaggtatgcaattttggagaaaaagtttttgaaaaaaatatagcctacgagagtaggagagagaaaagaggaagtagtgcagacgtgcagtcacattagtggcacccttttttttttgccacatcgagcacccgatcctaagcgtttctcccagatatttggtaggacatgtttttggcaacaaaccaaaacagccctcgtttccaagcaaccaatatatggacttggggtttggctctaagaaaactcagcacacaggtttattgtcatctttcctgtaacagttgatcatggttattcaaatctaacaccgacaatcctatacagaagcagcactaaaacaacaatacctattccacctatggccaacaaaaaagtgtatttttttcgtgactgtagaatgctgtagctaaaacaaacacaaaaacctcatttcacaaacttacataatgaactctattgcattcaacaggctaggtccaaaccttgtcatattgagcacaatgtcctgtttggacatgtagaactccgcaaccttctcccatccgcccttcctgatggtttcaggatcattgataacagtatggttccaaccgtatttctccagcagtgtgctctcttctggactgatgctgtactcgacatgtctcagacccatgtcccgtgcaggtgcaccatagaacccatcagccatgaatttgatcccgtatggcacaatgtgcaccaccactcccccggaccgcaggaacaccatgttagtcaagcccgcaccatgcacgcccatgattgcatcgcaggagtcaacaaggcgaacaaattcatcaaggttagaatcgatctttggatcggccttgaccacctcaaaaccaaaccaatccagcccttgtacaacatgtgccacgttgacaaatctcctggatttgcccctgtcaatcagcattatccggggcttcttgtcagggtcatctttgtcagccttatagggtatgtccacttcagctgcaggcagtccataggcttcccggacaaacaaccggaagtctaccattgtatagttctggggagaagaacttgggtcgatgccaaggtctcggtggctcctgagaccaacaatgacatgtgggtaacacctgatctggccatctgaatcaaaatcaataatctcatgccgcgtgaggcggctaaagattgcagaatacttcttgatgaaccagggctggttgttggtgatgataagctggacatctctgttgaattgacgggcagtaaggaacagtgggacaaggacatcactgaagtcatgccagacatttgctgttagcccacctagtgcgaagacaatggctgggatgtgatgcttggaggtacatattggttctggttctgaggaattcacagatttgatggtcaccttcttgatccagggaaggtgctttcgggactgtgctcggataatccactcttcaccattggaagcacggttctgtgggacatacacaacagtggaggactgtccaatggtgcgagcatcgccgcacagctcacagatgtcaaaccgggggttggagaggtcacagatctttatgtcagattgagccgtacacttgatgtacggttccgcacctgtttagcaaaaactggaggttatatatttgaattgtcaagaaatatcagcgtgtaaaaataactctcaaatttctcatttttgtggtgtcaaattttgaatgcactggaggagatttctattttgtgtctgctagcaaataaaatattcaaatatgacaacagggtttctacaaatgatgtttccacaaattacaaaacaagactggctaatccttgccatgccacaatattttctctgttcctgccatgcccctgacattggtctgggcaatacaagaaaacaacgcaataaaaatacttaggtgtatatcattctctttttcttgactttgtgcaattcaaaagtgtggcgtaatgttattttcctgagcggtctaaaaatactgaaatatggatggcataacaagctctcaataaggctaatttaataacacgacgaaaatagacaggcttgctcacagggcccctgtatcctagcggacttatacccattttattccagagaactccccaccaaaaaaatgttatgttgaagtagtagcctcctaatgtttagatttcgaactgcaatattacctaggacagtgaaaattattctttaattttcacagtttagcactacacagtggcggagccaggatttcaaagttgggtattcccgtctaacaaaaaaaagttcatagtagaaaaaatcaatggttcacagtatgtcaataccgataatcgaagaaataaaactataaattattacatggtacctctaattttctatttcggttccttcatggcttggaagagtagctttaattctacgttccttcatggtttgaaagcggtttataatatcacagtccttgactttcaaaaaaacctcacgctcaataaatgtgaccaagcaatgattcaagtattgatcccttagcctgtttctcaatttattcttcgcataattcatggcaaaaaagattatttcaacactagctattgctactggaagtactagaatcaatttgagaagcttgtaaacaatctcatgtctattgtgcaactttgtttcaacaatcataatggaaagatcaggaagatttttcacttttctaaacctttcatctttacacatcttagtgaggaagagtacttggctaactaatacgtgtacatgtgcatatattgaagtatacttgtttcttgataaaaaaaaacttgggtattcctggaaatacgtaggaatcatggtagctccgcccatggcactacagccctgttcccccaacaacacaaacagcttttatctacttgctgcacaagccttcctaacatggaccaccagcatgaataattagctcctacttgctagaaaagtctataaacaatgcatttctatgtggtgcatctaaagcatatggctcactggtagctttagtccaccgcaaggatcaactttactactaccaatacaacttttcccctttaacctccctcttgaataactctctttgctctattagtccttgattgtgcaggtgaagttggaacactatccgtgctgctgtactagttccaggaaagctagtctgtttatcgtcagtagtgtatgaaaaacatacaaacagacagctacattaagcatgtatctgtacagtacctgactctgctgtgcctccgtctccttcctgactttgtggaggagattccttgctcaatgagtctattcaggagccaaagaaaaagtaaaaaaataagatatagcatgctaaagaaatagtagtactgaccaccttggtcgcaatgaaaatagctccacttaccagatcctcctgcgctcctttcatctccagaagcttgtttaagccctacattttgtcacaattcagaagtcagaattccaaaaaaaaaaaagaaaagaaaatcgccactaaattgggacatgtgaaacagtatagcaagaatcacatcgcaccaggatttaaggtattgtcatcctgatcaatagcagccgcctgggatggtttctgctcttcgattgctgcctctttgttgggagactgtccatcctctgcatctccgaacccaaaccataaaattcgactaatccggcttggaatgtcataaaagatcaacgagctccaataatttaaaagaaaaatccccattttctatatctaaccttaccaagtctaatttgctcagtgtcctccccttctagctttgaagaaaccgttctctccaagtctgaacagcaatcatgcaaaataacctcaagaattaggaattaggaatgggaaataggacttaaaaatccttgaggctttaaggtttgttcttcttgccttgatctgcggagaccggcttatcgcgcgtgggccgcagggtgttgtcaacttgtaccggagcaaattgcgaggaagctataagagggaggactcgaaatttaagtacgcacgcatatcgcactggggaaggagcatatctgtagtctatatagagagttggagcactaagacgaaataggaatccgggcagactgaccgttggggcccttggcgaactggccggagaagacgactacggcgaggacagcggcgacgaggacggcggcgaagggcgcgccgatcctccggcgccagatgccctgcttcatcgcgctcttggccatcttgggggatcccatcctcctgcctcttccccccttccttggacttgcctcaagctagcggcttctgttggagcttggcgctaggcaggtggtgtggtgctgtgcgggtgcggcaccatggaggagggaagaggaggaggacgaggaggcaaacagtactaacaaaagtcgtctcgtctttgggaattggagggctagacctgacaccattcttatgcccttctctgcagctctgttttttctgtacgccatgcggactgctctttcacaaatctcggccgtcagattggtatcatcattcccatcaagctttgcatcgctggatcgagagaaagaaagaaaaggaaaaaaaaaaagcaagttgcgccgaacagtaaaatgttgttctaaattgcgggagagcacccaacggaacagttatatgcaaatgaaaaggtatttacatcgacagacgtacaagaccatctacaacaaaatgaatttaacaataaaaagagaaaaacatcctccaacaaacttgcaactctagctactctggctgcaggctaaaacgaaccctcggcccaccacgttttctctctttcacgcgtagcaacggccgcatcccctcggcctttcctctcgctcatggccacccgccatcctcactgtcattgtattcggtcgcccctcctccctcggcacgagaaacattggcaggcttctccgacgagcagctgcctcccttcccattcccttggccatggggacaatccatcgtcgaggatacaatgcgtgccaaagcgttgaatctgacgccttagacctgatctcaacgaggctggtgaggaaccagatagagctccgatagcctttcacatcgagctccacccgacgctcgtgccaagcttcggttgtcgttctcgacccgatcacgttgaggccagcgaggagtagattggcgtccacaccaagtgtcgacctctccacactcctccatcaagattgcgacctcgttaccgctatccgctgcccgtgataacacctagaggtcacctagtgaaggagcgctccggcctcccagccgtcaccgcctcccacccgcgtcatcatcactgcctggatccaccggcccccatctagatccgtgtgtgggcgaaaggggagagctgacagtagagggagcaacgcaatagcgagggaggagaaaggaacagtgcgatggcgacggtgagcttgggtcagccatgacacccccgatctgcgcacgggaggaaggctcgcagccacggatggtcgcggcggtggcaggacggctcaactgcaagggaggaagggagtagcgacaacggccagtcatggagtctagcataggtgtgggtgggtgggtgggaaaaaatctagtgtgagggagaaggaagaattaaagagaggttgatatacatgacccactgtcatattggagagtggtagagaggcggttggagtgaaatgcaaatttgactatctatttttttttgggcaagctgttgatggtactcaaataccaaatttgacaagttcctgcacaaaagtgaatgaaataaaatatcaaacttagtggttgtgtttattactaatcatttccataagtgttagtgaatatttgtatgtaggtaattatgtatgaaaaacacatctgttgtgcaaagaaacacacctttggccaatcagacgcatgtacatggattggagggctcacaagtcagagcaaaccgacatatttgagggcaattcaccgtgcaccgtcattaaggcccacaaaacagttaatcgggcgaaaatagtggagaaaggcagtgaaagtggttcggccgaaccactagttcgacccatcgccccaagcttccacgtgccacttcctcaggcctccccaatggtggttatacctgactcccggtaagttaccgacttaaaccaccatcattggagctctaaaaaggaggaaaagccctcactctcgagacacaacaaagtggaatacaactcactttcatatttgggctagttagaatataagaggagagtgaggggaaaatccgaaacgagtgccccaaatgtcatagttctctccgtgggagttctagaggagtgctggagatgttgatgttctctgcatggggagtctcggaggagtgccggagatgtcaacactctctccgattttgtacctcgacggatgctttcttatttaagtgagatatattctcatcattgcaggtttgtcccttagtatttatattaaatgctctagtactaagactctggataaaggaggaagttcttggtcaaggctagagtagtaatcgacaatgtagacgtagtgtctaggttagaggtttccttgtttgctgtgtgctccacggaatgtaaaggtaggtgggaggtggtgacagccttgtccgtctttcgtaatcctccacattcgggtacatcataaagctacaggccgaactcaacttgcagaccagggtagagctggtgcctgaagcaattgatagaatttaccttaacttaattaagattattaactcataggaattttctctatcctaagcctaccatttagttgttatccttggatgaatccttcttagattctacacacacgttccttgtgattcgatactcttggaatactctgaggtgaagtgctaaagcagtatctgtgcacttgtggatttatctgtgaccataacaaataccaacacaagctaaccgaatagacacatttgtgttgaatagtagaagagggagagaatactacgaaactgttgcacatgttgtattgagccttaaggaccagtatatatagaagaaaacatgggtagaggtaaggaaggattagagataagaaaagctacggtacaaatcaatcctatcgtaatacatctctaactaccatatattctaacataccccgtagtctaagcgtgagcaacgcgtacgcttagactggagaaaaaaccctcaagagtgctcaacacggatgatagccctattgtacaatagttgatgtagtcaaagcgaaggagctgtggtcgatgaagccgtgtgtagagtagccatggttgatgtaggtaaagttgggaagccgatgtcgaggaagctgagccacaggtgcacaaggagtgcaagtagtggtcacatgcatgcgggagggcatcatggaccaaggtgcacgaggacgcattgaggatgaagatgttgacgcaatcacggtagtcatgatggaagatgacgccgaagagccatgcagtcgaactgtgtaggacgagatgtcacgccgggtttgccagtgatgaagccatgcttaggagggcgcctcttagcactgccacaactagtgaataaggaccacaggtagcgacactgcggcccgaaggggtgatgcagcgatcggccgaagcttgatggcatagacatgtacttgaagacgatcggtagtagggtgtcattgtagctaggtgcttgaacaggtgatcaagccaaagttgcgtagggtggggagttgtagaggaagttgaagtcgatgccaatgttggagacgcgcatatgccaatgaagcagtgagcgacgcaaacccgatcgatgaccgggaaagaaaaaaaatataggcagcaaatagtggtccacagtagcaatccatcactgctcctctcatgcctcaatggtccatacacatggtccatagaccactggccagactgcctaaatctcctttctctccctgctctcaaagagagctagcaaagaggagttcgagcaggccagccacaaggtcaacttaggagaggagcagcaagggctaaggggctccacgaggcgagtggcataaaggtcgaccggccctggggcgagcatcggtggcaccggtggcatcggtggaatccgggttgcgtcaggagcagcccattggagaagacttggtggccggcagtggagccaaagaggtacgtcggcgtggagaggagctggagatggatgagtcatcggggccagagctcactgaggaaagcaatcgctctaaggatggaggcagtggagagggatggcgtgcgtagaggtggcagcgttgatggtgaacaagtggcctgtcaccgcagtgatagatctgcgcgtcgaggccgcggcaatgggcacaaccacgtggagagtttccccgaagcggtggcggggtcgaggcagctgctgacctgtgaatctagaggaacgggaggcggccactatgtcaatgacaaagacggggtcatagggtgatggggccagcggcagagagccgagcattccacgatgaccgtggaccagagtcccggcggcttgggcggagcagatcagcgtggtcggtggcgggtccccttggaacagtgctggcgaccgagatttggagaggacgacacggctggagtagaggcggtggccaagctgagcctagatggtgtggagagtgagaaggatggagttggcgatgagctggagacgcgaaggatggcaccggcaatggtgttgggtggtccccctggtaggatggcatcggcgacggcgttgggcggtctcactggttgacgatgaactgttggttgctgctttacatgaagacgatgacatgaagaactaggctcgccagaggagatcaaggtcgatcctcatgggctaagcacaacgaaaaaaatgaaaacggatgctgccccaagaagttcgctactcctgggggcagcggaggcggatgtgtgagatggatgctagatcaaccgctctgatactatgttgaacagtagaagagggagagaatatcgcgtaactatagacacgttgtattgagtctcaggggccatgtatactagagaatgcatggataaggataaggaaggattagagataaggagagctacaatacaaatcaatcttatcgtaactgccatatacttaaacaattcggagagctaaaaacaagaattcttttgcatatgctctgagcttcgcaactctactgggcaagtgaacatttctatcttgccttcttggatttttttttttgaaacagatgccttcttggatatgtcatttttgaatgtttcaattcagtatcgtttcaaagtttacaattgacacatgaaaatcatgagtataaatttcttcgacaagaaccttcataatacaatggttttcatcatcttttgtaaatttataaaaaaattacaagaaacatgacgactaccctataagggctcctttggaacaaacgaatttaaattttaaagtattggattcctatgaaaagatttcctattagtcttttggaataaacgtttgaaattccttaggattgtctcgaatcacaggaatttcttaggatttttaacataaggttcaacatcttcttagaaaaaattctcttgtgtctatctatattatctaattcatgtttttttttctgcgttccatccaaacgattatttctaccgttttcttgtgtttttctatccataggaattaagatgtcaacacacttgaatcctacgtttttcttatcattttgaaagtcctacgaacgaaaggagccttattattcaaaatttttgaactggccggatcattttctctctactgccaataggatcgcctacaggtggctttgttgcgtgcgtgggcaggtagacagagctacgatccaaatgattcagatcggatgtgcagggattagttaacaaaacacaagtagtacatacattatctgaaaaaacaaagcacaggtacgacagatggatggatcatggatggggtcatgtgaactaaagtgttgagtgagagtgagaccccccagtggtgttgtactggactacttgtgttggtggatcaggtagtgggagtgggagcgggagtggctggctcacatgcaggcgctttcattagctcgatcgagattgctagtggggcgctttggatctaaatgagagatgctgacgcactcgtcaaggagcaacatggtggttgcttaattaattcaggagagtgattaaggggagccaaattaacagctaggagtagcttcatgaccttaattatctaggagtagctaggagtagcatctccggtccaaggcactagcactgtagcacaacaacccatcgcctgtcaggtttagctttaaattatcaagttttgatcaattgcgttacaaaaatgtctaccgtataggagaggtatcattagatttgatctgtacttattgacagttatatttttactgtagtcggtagtacgctataggtgctgtttggttcggtaaaatttagcccgcacccaattctagcgcaaacagatctggttccgttgtttgtttgagacgctccgtaattggataccattacgggcttaattcagaggcgataccactcgatcaggagcgataagcgttaacgatacggagagacaacacgagaaagaatcaagcgtcgcctcggccgctcccctcgacccacgtgtgagaaccaaacaaaatctaagtttgccgtaatctgattacaatcacagtgctatctaatgcccttaccgtttacgtttgcaatccccaactaaacagcagtagcattaaaagtgcgtactaggtgatttaagtacacagactcaatacgcatcatctgtgatcgagatgcataggggcgtagcgtagccgcgtaggtgtgtctggccgccactgcacgcaccaaaaatttctatagcctcaactgtctttcactttcttttatcattgtggggggaatcattgcaaaccttaacggctgggggtcccgatgctattctttcattgtagtatactcaatccagctttaatttgcctgaatgaaaaataaagagagaagcaaattaggacaagaggaggaaggaacacgtatgaggccttcaaaaaggttaccgttccagctcgttaacgtatttatattatacctttatctctactattattattgttatgaaaatagatgcacaacggagacacgaatttttacgtgaaaaactcttgcgggaaaaaaccacgggcgtcgaccggcaatgatcactattgaggagatgattacaaacgtaggggaattacaatgggaacgtcaccccttcccgtatggcttacaagagtatatataggggataaaagaaagacacataataggaactcctactaggaaactaatccgaatatattgtgggcccaaaatttggatcacatatttaacaatctccaccttgagacgaatttcctcttgtagcataaaaaacatcaatcacaaaaaatacctcatgtaggtaaaatcaccgcgcgccaaatagtctctaggactatactgtaacacctaccaagcttgagcaaagctcaaacttagtagtgggaactggctttgtcatcatatcagctgggttatcatgagtacttatcttgcatactttgacatcaccttcagcaattacacctcgaataaagtgatatctcacatcaatgtgctttgttctctcatggaacatttgatcctttgtaaggcatattacactttgactatcacaaaatatattaatgcaagacataactccacaaagatcagtgtacaaacctctaagccaaatagcttctttacaagcttcagaaatagccatataccctgcttcaatagtagataaggcaacagtttcttgcaaacttgccttccaactaacagcacatcctccaatagtgaaaacataacctgtgagcgatcttctcctatccaaatctctagcaaaatctgaatccacataatcaacaagtccatctctagatctcccaaactgcaaacaagcagtagatgtaccacgtaggtatctgaaaatccattgaacagctttccaatgctctttgccaggattagccatgtatctactgacaacactcaatgcatgtgataagtcaggacgagaacatactatggcatacataagtgaaccaactacacttgaataaggaactctagacatgtactcaacatcataatctgactgtggacataaatctgaagataatctgaaatgtgcagctaaaggagtactcactggttttgcatcatgcatattgaaacgacgaacaactttttcaatataacctttctgactaagatataacttgccagaatgtctttctctagtaatttccataccgagaattttcttcgctgcacccaaatccttcatctcaaattcactactcaattgtaccttcaactttgctatttctgatttgtcttttgcagcaatcagcatatcatcgacataaagaagcaaatatatagctgaaccatcaacaactttgagataaatacagctatcataattggatcttctaaacttctgagaaagcatgaaagagtcaaatctcttataccaatgtctaggtgactacttcaacccataaagagatttcttcaacctacagactaggttcttttttccaggaacaacaaaacctttaggttgctccatataaatgttctcttctaactccccatgtaaaaatgcagtcttaacatccatttgctctagttcataatcatgcattgcaacaatactgagtaaagtgcgaattgaactatgcttcataacaggggaaaagacatcattgaaatcaatacctggaatctggctataacctttagcaactaactttgctttgtaccttgcctcatcacttggagataaaccttcctttcttttgaagatccacttgcaatggattggtttcttctcctttggcaacttcaccaattcccaagtatgattcttttcaagtgactctatctcatcatgcatagctgtaatccatctattgcaatcatcagaaacaatagcctcagaatatgtagaaggttctgcattaccttcaatttcttctgccacactcaaagcataagcaactatgttcgcttcttcaatatatctttgaggaggtttagtatttcttttgggcttatcttttgcaatagaacgttttggagactactgaacagtagaagaatttgaatcttcaataacaggtgcatcttggtcaatagcaacaacttctttttctggtgcatgccctaaactgatcaagtgctccacctgcacacttgctttctcctgactctcaacaggaatattagtagaaggtttgtcatgtaacataactgattcatggaagacaacatttctactaatcacaacctttttggtttcaggacaccataacttataacctttcacaccagacggataaccaagaaaaatacacttaatagctctaggctccaatttaccattatcaacatgagcataagcagtacaaccaaatatttttgagtctgaataatttgctggggaaccagaccatacctcaattagagtcttcttatcaatggcataactaggtgatcgattgataagataacaagcagtggaaacggcttccgcccaaaactgtttaggcaaacctgcattagacaacatacaacgggcctttgatataattgttctgttcatacgctcagctacaccgttttgttgaggtgtgtgaggaacggtgtagtgacgcacaatgccttcagacttgcaatatgatttaaatatcttagaacagaactccatcccattgtcagtacagaggattttcacctttctttcagtttgtctttcaaccatagttttccactctttaaacgcatcaaaagcttgatatttgtgcttcaagaaataaggccaaacttttcgcgaatagtcatcaacgatagtcatcatgtaatgagcacctccaaaggatgtcttacgagcaggccgccataaatcagaatacatataatcaagaataccttcagtagtatgtgtagatgtgttgaacttcaccctcttatgcttgccaaaaatgcaatgctcacgaaatttgagcttcccgacgctttgttcatctagcaatcctcgtttgctcagttctgccaaaccaatttcactcatatgcccaagacgcatatgccaaagattagtagcatcggaattagataatgaatcagaaactgttgcaacattacctaatatagttgtacctcgcagatggtacaggttggcagatttaatatcagctttcatcacaacaagagagtctttagttaccttcaaaattccgtctccaccggaatattgtaccctttgcgatcaacagtacataaagagatgagacttctcttcaaatttggaatatgccgcacatctgacaatgttctgatacaaccatcaaacatcttgatctaaactgttccaatacctgcaacctcgcatggtgtatcatcacccatcaaaacagtaccaccttggatagcttcataggtggcaaaccaatccctattcgggcacatgtgataggtgcatgcagtattaagaatccactggtcactagtttgtgcacaaccagcataagcaacaagcaattctgcatcagacttctcatcagttacaaccgcggctttactttcctcttctttcttaccttttggtatatattttccggttctcttgtctttatcttgtagcttccaatactcagagatatcatgtctatctctcttgcagtatttgcatgacttataccagtctctggactttgatctcccacggtagttacttgaacttttatctcttgatttgctgtttgtgttcttttcatgttgcctgccccgaacaaccaaaccttctgcttgtgaatttgaaccttcatagggtaccatcttcttcatcttttctttggcatgcaaagcatcataaacttctttcaaagttagagtatcacggctataaagtatagtatccctgaagtttgcatatgagctaggcaatgaacacaataaaataagacctaaatcctcttcttcatactttacctccatagactcaaggtcagcaacaatttccttgaaagtggagagatggtccatcacagactcatcatcttgcaacttgtgcaaaaataacttttgctttaggtgcatcttattggtcagatccttagtcatgcatatctgttccagcttcaaccacagtccaacggctgtctcctccttaagcacctcctgcaaaatattgttagatagatgaagatgaatatatgacatagccttacgatcccttttctactcatcgttggaccaatcctgtgtcctcctgtcaaattcagaaagcgtatcatcgaggtcttattgtgcaagaacgactcgcatcttcacttgccaaagtgagaatcttgtgtctcggtccaggagcggtagatcatacttcaaactcgccatgggaattaatcctgaatttgctagtaagaattagggtaaacctagcaaaaacacgaaacctggtacacttctcgtgtgcacgtagcgtagatctgaaacttcctggtacacaagcttggtgcgtgtagcaattttccctggaaaaatcagcacgcacagaacaaaacagccgatctctctctcggctgattttttattcctcaggaaccgtgtgctgactagattggttcctgcttttcctcggtatgtttgcgcagacgagggcgctgctgctgctgcgtgcgtcgctgctgcggggctgcggggaggacacgatccaatcttggtgacggaacaactccactcgacgcgacgtccaacgacgtgtgcttccggcgacgagatcgatttcttcgatcgggaaaaacaccggtggccagaaatagttgatcaatctccaaagctctcgtaccacttcttataaaaatagatacacaacggaaacattaatttttacgtggaaaacccttgcggaaaaaaaccacgggcgccgaccggcaatgatcactatactatagaggagatgattacaaacgtaggggaattacaatgggaacgtcaccccttcccatacggcttacaagagtatatataggggataaaagaaagacacctaataggaactcctactagaaaactaatccgaatatattgtgggcccaaaattcggatcacatatttaataattatcaaaattaaagatttttttccggtattttggtacatcatctgtgtataagtcggtttttaagttcgtttgctttaggaaatacatatttgagtcggtttttaagatcgttcacttttgataatatcttaactaaaccatataacaataataagattaaagtcgacttcacatgttgcaacgcacgagtatttttctagtaattttataaatttaccattgcataaaaataaacaaataatttgaaaaggaactctctaaatacagataatttggatataattaaagaagtgctaagaactccctaaatacatgaattgaaggagcacatagatgttctaggccaaagtgtccgaacacaatatttgatgtaaatttcacaaaactacatatactacagctaaactatagcaaaactacatatttaagggggtgtatcgtacaactatatatttagcaccaattttatcacatacttatatcttttataactctagtagaacattagctatagagatctaaccatttaaatatgtagtcactacgccaaaaccgctcaccttgcacagcccaccagccaccagtgacaggccgaagtgctcatcatggatggcctcaccttttgatgggtccatggggaggccataacaggtgaggcctcaggccacggcccatcagagacattagatcacctatgacggcctagaactatcacccatcagagggacatctttgtcggatgctagttttggaccgtcacaggtgaactaatacctgtaatgggccacgcggttctagcccagttccagcccatcagtgacaagatttattcatctctaccaggctctagccctagctggtctgaggtgagttgcggcctatatatacccccaaccgccaactgctttccgttccaacctagtgtgttgttcacattttgggtgggagagcaagggagtgaatttttgctagaaattggaggtaaaaaaactatgataattattttataacgtatattacatattgtgtcttatatttgttatcttattaattgcagatggactgaagttggatgtactgtattcagtgttcgaccccagagtatagggagggggtcacagaattcgtatattttgcagataatgataggaaaattaggatgagtaaatatatgttgtgtccatctgcggactataaaaatgagaagatattcgatgagagttcatgggtacattctcatttgatccatagaggattcgtggaccactacagatgctggagcaagtatggagagcaaaagacactagatgttgcaactaatgaggtgccagatgtagtgaacaacccagtaggttgagatggtattttcatcccttcgccattaggcggagatgccatagatttcgagccacaaactctatcagaaatgttgcatgatattgaagacccagatcataatgagagggatttgagaagttcaataagtcggtggcagattctgaaatgccattgtgtctcgggagtaagccaaagcactccaagttatccctttgttagaactcatgaagcttaaggcaagtaatgactagttagacaagagtttcacataacttcttgagttcttgaaggggttgttgtcaaaggggtaccaaattctgtagacaacatatgaagcaaaacaagtcttatgctcattgggtctggaggtcaaaagaattcatgcttgtcggaacaactgcatattgtattagaaatagtattctgatttggacgcttgccctgtttgtggggcttctacatacaagcgagacataagtgaagatgaaagtcataagtcaaagaggggtgacccaacaaaagtggtgtggtatttccctattgccgaccgcattaagagaatgtttgtgaatcctaagcaagctaagttagtatgctacacgcgcgctgaagaacagaaggttgatgctaagctgaggcatccaacaaactcagtgcagtggaggataatcgatatgtttcgccatgtgcactgatggcattaatacatttggtgatttgagcaatcgtcgtagaacatggtctattgttaaacatcagctccctataaaaccaggatatcggtcgttcaaacaacctctaagacgattcaagcctgagatgttgtcacaccccgaagttctcctcccaagcctaaatttaatttataaatgaccctaagaaaataccggtgcaaagcaagagtaaacccttttaaatcaatgcaaataataatcaaaattggcatctggaatttttcttgagttctacatgtcgaaattctctaacaggatttttagtggaattttcagagccctagaaataattttaactaattaaaattgagcaagcaatattttaattccagggaaaatcctttttcctttttctttttctttttcctccctttttcgaatgggccgctggcccattctctcctttcctccccctcctccctgctgggccggccgcaggccgaggcccagccaggccgccccgccgccctcctctccctgggtcgccgacaggtggggcccacctgtcgggtccttccccaacctcccgccgctcccgccgcgccgccgcgcccgcaaccgtcgccgcgcccacgtctccgcctccttcgggccacgtcgaccatgcccgcgcgtgcgccgcgttccccgcgcccactcccctctctcacccgctcgcgcccgcgcccgagatggccgggattcgattttcgaatcccgcctctctctcctcccccacttcccacgttggccggcgaattcccgcctctcccggccacgtccgaccctcccctcccctatttaagcttctccgtcgctccctctcactttttccccatctcgccgaactctctcgagcctcccatcgctcccgcgccgtgcaacctcttgccgccgccgtcttcgctactccggccgctgctagccgccgctggggttgccgccgcaccgcgccgtcgccgccgtcgggttcgcgtggccgagatccaccccgtccatccctccgtcgaggttcgtcgccggagcgccattcccatcgtgcgacggtgagggtcgccatgtccgccgcttttggtcggcattcccgtctcctatggcccctctcttcctctctaacctctttcttttcgttctttaggtcgtcccggtcgccgtccgccgcgtgtcgacctctctccgtcgctcctcgtcgccggacgccgccgtcccctccggtgagggctccctcccctttcattttcttccccaattccccgtgcgtcgccaccgctcgcgctcgccgtcgccttcggtcgttgccgccgtccgctgccgccgcttttgcgccgtcgcctccgccgccggatgccgtcgccggcaacgcgacgcgcgcgtgccgccgccgctagccctggccggccggtcggctttgatgccgagccgagcccggcggccgcctctatcgccgcccgtccgatcggcccgagggcgatctgggccatcggtcccgtggaccggcagtggaccacctgcgtggtcccggtccacggtgaaccgctctcccctgagccgctgaccagtgggccccgcttgccggcgctgcaccccctccgtgctgacgtcagccctggaaaatattgcgcaataaaatatttaaggatttttgttatagtaataaacacagtgaatcttctaaaattcataactaattcatccgagctccgtttaagcccattcaagtctcagtaaatcaagaaaaatgtgtagaatccattaaaaatggttttgtcccctgtttcagtagtcttatagcctgtttgcaatgtttgccttgtatgtcgctagattccggttcctccgacgctccggtgtacttcgaaatagtcgccgagattcctccagcagcagagcaaggcaagtcatgcttgtcacttgaacatgttgatcctatattgcaaatgctctattgctttctttcaaatattgcattgttttataatgttactatgggatggttacctattgtcatagccatgctactattgtaccatgtccctttgtcagcttggggttataacatgactagagattggactagggattgcttagccatgcttagttcaactagtgcacaatggggaaaatcctattaatgtttagactgttggttctaatggttttgttggtttagtgacaccgctttggtgttggttaattaaaataaatcacatggtgggctgtgggtgcatggttttgctggtcgcacccatggcagttaaggaccgattcgcgggatgccctggaagaacttatcgtacttaccacaagccagcgtgggcaacggctgggcttgtagtgtagctctcctctagccgacgcatccaggcaagggtgggcgtgatggagcagggcgggccctgcgacggcctctgtcgcttccggattcacctaggcacgagaggggactgcccgttgcccgctggggacgggggtgaaacctgaggtgtggtgtgcttggctagagggggttaggcgaagggtcctgtcatggcctctttccgatatgtcgtggtggcatgtcggcgcacggaaacgtgttgtggggctgtgtcttgtgggtacagttgtacacctctgatcagagtaaaactattcgaatagccgtgcccgcggttatgggcggtcaaccagattcaccgtgattagtctcaccctagtgtaatcttttgaatttggatagtttaggtggatggttgggcctgttgcaacgtgggataacgttggacagtggatagttaatactaattaaatattacaactgtttaatcttacaacttctgtttataaatgctcgctttatgcaaatgaaccactccagctcttctttgataattccctgcatcatacccctattccggtatgacttgctgagtacagtgggtagtactcagtcttgctctatttttttcccaaccccagagctcgagtatgtgtcagatgaaggtttctccgaggagtaggcttcgtccgtgccgtcgaggatgcctgtggagtggtgttcccgctgcagttctagtcaaggcttagctcctgttgtctttcttttcttccgttgcatttgtgtaagacttttatgatgtttgtaagacgtggatctgaatgtcaacattgtcgtttgtgtaccccgaccggtcctggacggggattttaatgcacattctgcttggaattctactcgggaatttctaggcgtgacagatgtatgatgctaatcaaggctgagataagtaggctttaagatgcaaaattcattagaccatgccgatctgctgagtgggtttcaaatatagtaccagtgatcaaatgtaacggaaaacttggagtatgcgtggatttaagatatttaaataagtctactcctaaggatgaataccccatgccgattgcaagatttactagttgatacaacttctggacacaagattataagcttcatggatggtaatgcaggatataatcaaatttttatggctgaagaagacatccattagactgcttttcaggtgtcctggtgccatcggcctgtatgagtgggttgttgttgatggctattaaataccaaattcacacagtcaatacctgcataaatctgaaagtataaaacatccaacatagtggtagggtttatttctaacaataaattctcaaccatcaaagttgagaagaaatatacataaaggagaggaagaattacattcatatccaagcctatggagtcttgggcccataagtccaacgaaatacatgtgggcccaatcactatgccactagattaagggccttcctgccatgatcctggagaaaattcagggccaaatggcccagcaagggttcagccgaacccaaaactggcctgttcggccccaaatttcatcggcagttactaccgacgtcccaatgacgattgtcacagttttcggtgctccaaccatcattacgaggacggattgcaagaggggagtgaagatgtcgtcaggattccatggaggatctccatactcccaaggcacctacacctataaatacccctcacctccttcattccaacacacaccaagtatgaactgaattataagatgcactattgtatcttttatgtacattagaataaggagagagtaagtgagaaagagttggagaaatttcggagttgtccgtaatttcctcttacttttgtaccttgtcaattactctgctttaattgataatatctttattgagtaattgagattcactttgtgaggattatctcttagttcctattagcgtactggaatattgttcactagaaatagtgtttactttaatgtttgatcggcattagagtagtattaaatagtgtagacgtggtgtatatgctattgagtacctgtatttgctgcttattccacagttcggtatagaggtgggtatagaggtggtgataaccctcaagattaatagggagggacttgtatagatacatgacatgctatctaataggaccacaaagactcagctaatgcaatatgccacgttttaggttgttcaataatcttccttttcaccaacttgatcaaactcttgttacatgcctctgtctgtccaatagcttgtgtataatcaggagaagaattcaacaactttatgcccatgctctcagcaaattgaacaatttcattgacacaaacatagatccttgatatgtggtgattgtttgtggtatcccaaatctatatataatatgttccttgacaaactcaatagcatcttgtaacaccctggaaattcgaccgacaaaaatctaaactctaaaaatatgggccttcaaaaactttttaaaataaattgcatcatgccgattttattcgcctatttcattggattttgaattcggagtttgttgatcgcgaataaagaataattaattaggaataaaacctaaaattaaatgagcaaaataaataactgaaatataatttaaaataaaggttgaggtagggatagaaacgaataaaatattatcgcgatcatatttgtattaattaaatctaaatacgacggaatgagaattaactctaattaaaatcaagtaaattatataaaaataaaatatgggtacaattaatctagagtggatccattggttgggataatacacgtattgagcaaacttcatttatgcaagatttagaaattatagaatcaaatttatataggaaataaactaaaattgggataaataggaaaatacattgttcattatggcgtaggtgttcgatgcggtccctagccttccccctcctctcccacctctgcgccctagccggtcttgagctccgcgtcgccgccgcccgtcgcgtcgccgccctgcgtcgttgccgtctgccgccgcgcgccgacgccatcgccgctgtcgccgtcgccgtcgtgtcgccgcgcctcgcgccccgagccgccgtcgccatccatcaccgtcgacgtcccatcgccgcgcgcccgtcgccgtcacgcctcgcgccgcgcgcccgccgcctcgcgccccacgcgccgcgcgccgtctcttcgccgctgccgcgccgcgccgccatcccgtcgccgcgcgcgtgtcgccatcgccgcctgccgcgccgtcgccccgcacctcgagccgcgccgccgtcacgtcgccgcccgtcacgtcaccgccgtcgcatcgccgccttgagccctgcgccgccgtcgcgtcgccgccccgagccccgcgccgccgtcacatcaggccggccacccctccccctctctttcttccccctctcccctataaataccccttcccccttctccaccccactccattccctcctctccctctcccccttctccacgcgccgccgtcgtcgtgccgccgggccgccgccttcgaagccgccgcgccgccgccgcgaggccgccgcgccgtgccgcgacttgcgccgccgtcgccatcgtcgccaccgccaccgccggtgcgccgtctcccccccccccctcgcatccaccgccatcgccacccaggtgagcaagagccaagagagagagaggaagggagaagccgatggagagaaagagaaggaaaaagaaaagaaaagagagaaagagaaggaaaaagaaaagaaaagagagaaagggaaggaaaaagaaaagaaaagagagaaagagaaggaaaaagaaaagaaaagaaaagagagaaagagaaagaaaaagaaaatagaaaagaagaaaaggagaaaatagaagagaaattaggggagagattaggaggatttaggaaataaaaaaatggtcggggttaatcatagattatttttggaaattcctagagtgtaatagtatttcgatcaaaattccgggttaattatagaaataggtttcttgatcggattagattaaaattggtagtaatttagatgtaattaataactaaacaattagatgatttcttatagattatttttggtaatctctataagtcatcgattcacggtagaaattcggatttaattactaggattttagccgtgtattatatttaatcgtttagtcatagactaaattaaatcgtacaatattataagataattttaggattttgtccgatatttagctcgcgatagaaatttctaacctattatatggatgtaatacccgggcggattaaattaaaaacttgtgctaataaaataattatgccacaaaatagtttggggatggatagagttaaacaaacggagtagctctatttcacgaacgaaaatagataatgtaagaaaccgacttccgcgcttgatatcttcttggatttacttggatctttatttgaattctaaccgaattcaaatcgtttcttcacacgtaattatagagcccgagggagttgcggatacaagcgaaggtcaagacccgcaagactttgagcaaggcaagtcatcactatcccttgaacatgttgatcccaattgcaaaattattttatttacaaataagaatgcatgcaatgatgaacatcctatttgtgaatatgccataccttgattattgtttacccttattcccttgtaaccatgattacgtatgagtccctagtcaacaatgacaaatgcttagagatgctattctagaatcatgcatactcatatttatcaaatgctatatgcttgggcaattacctttgggaatgtaattgagatgcggcatgtggagacatgagcgccacattgccatgatgttgatgacatgagttgtgaaaggagaaataaaattaaacaactgttttcgactggggcggacggaggatttgggtggtatccggaaaaggctagtaccgtccccggtcaattaaggaccgagccatgaagttaagcatgaaacgacctccgtacaaccgcacttctcgtatgggtatagacctagcggagtagatagctgagcggaggcagtatccatgcatagtggtttcttgatgtgtgaggcaggggctctacggtggggcagccattggtaggaccgcgaggcgggtgtctacagtggtgtcgccatcggtaggactgccatgtgagaatctaaacataattataacttaatgcatgtgtgagtcttcccttcccgggtgcgccagaactcctctcactgctagaaaccgtgtacgcctagagtgcatgaggatgtaaagttcatggagcgggtactgccaatgcaaggttatcgaaaagctttgccatgacgcgtctcatgtgttgggatgaggctcatgtgttgggcagtcgcggagtgcgggtaaagtgtacattcactgcagtgtgagtaaaccaaatctattcgaatagccgtgctcgcggttattgagcaccgagacatgtattacacttggctagactctaaattcttaacttgtgtgggatgggatattgcatgatgatttctatactgatggagccacttcctgagaggcgggaatgtggacgtcctcagaaaaccatgatgactcaatggcgggaagctatccttgggatcacaatggatggtggtcagaaccgtcattgtttaatatgaacactggtactaaaatttgatcagtgtgtgctaggtcttaggtttgtgaaaagaattataaaacttgctttgcgcaaaagaaccatagccatcctttgaatacccctgtcatgtgcattgttgttgtggtggcttgttgagtacggttggtactcacccttgcaatatacaaacttaatcagaggtcggagatgaagcttcggaggatccctactcttactactaggagggtgatgaagacgatggcgctcagtaggtcttagttatggtcgttgcctgtggcaatggcgtgccactgccttaactccgctgccttatctacttctgtttttggaatgtattccggaccgctcggtccgaggatttaagactatgcctgcgggcttttgatgtaataattcatactagactttcgtgtatgtgcatttggtatttcagctattaactcgtgtgtaccagactacttgatccaggaaaatggtactgtttacacgattgattcctgttataaaaacgggggtccacacatctctagaatcaaccttctttaatggaattgcttcaacccacttggtaagtaatctgtagccaccaaaataaatttatgtcctttgcttgatggtggatttatctggacgatcatatcaattccccatcctctgagcggccatggcttgattattgagttcatagccgatgcaggtgtcctctgaattgacccaaacttttgataatcttgacatcctttgtaatatctgaaacaatcctctagcattgtcggacaaaaatacccaactctcctaatcgaccacttcatcttatgagccgattgatgagttccacaaattccttcatgtacctcacacataacaactttggcttctaatttgaagcacttgagcaaaactccatcaatcatctgataaaacaaatcatcatccaatatcacatatttgagagccttgtatttcaatttccttgaagcttattgagaaggattttttaaatactcaaaaattccgtacctccaatcatcgacttgtatagcagcaatttcaatctctatatcttttaacatcgcttgtatgcagatgcacttgagctagatcattggcttcaacattatgttccttgggaatatgcttcatagaaaccatcttgaactccttcatcaactcgtgatatttcacattataaactctcaagacatcattcttgcattcatactctcataattgattgatcaccaataatgaatcacccataatttcaatagcgtcaccttcaacttccttcaacaactgtaatcccttcaaaattgcctcatattctgcttgattgttagtataatatggtataattgtgaaagcaaactcaaaacttgccctccctccccccccccccccccgaggcagtataattactaagccgataacacaaccatgagtgcgaactaatctatcaagaaataaagtcgaaggcactaatttaatgtaccaattgaatcatttcactgctccacaatgaaatcggctattgcccatccttttacagctttggccgattcatatattagatcaaattctgtcaaagctaaaatccactttccaatccttcccttccacacaggagccgatagcatatatatgacaacattggctttgcaaatcaccgtgcactcatttgaatgtagataatgcctctactttttacatgaaaaatacaaacttaagcacaatttttccactggggtataccttgtttcagcatccaaaatccttctactaagataaaatatagctctttccttgccttcaaactcctggattaacactgagccgattgttttttcatcagctgataaatacagctagtaggttactcctttctatggtggaatcaagactagagaagaactcaaatattccttaatactatctaaagctctctgtcgcgcttctccccccaaacaaattcttgatcggctttaatcctcaacaatgtagtaaatggttctaatttccttgataaattggagatgaatcttcttacaaaattgatcttgccgatcaaggattgtagtttctttttattcactggaggttcgatatttttgatagctttcaagcttctttgagttatctctattcccctcccatgaaccaaaaatccaagaaattgtccatacgatacaccaaatgcacatttatttcgattcatcttcaaaccatatttccttgttctctccaacacttggcgcaaatgggctagatgtgcaacaatctactttgatttcacaaccacatcatcgatataaatttcaaccagcaagtcgatcagaacatgaaatatataattcattgcacgttgatacgcagcagttgcactctttagacgaaaagtcatcacaacccactcatacaagccgattgcaccaggacacctgaaagcagtcttgtgaatgtcttcttctgccataaaattttgattatatcctgcattaccatccataaaacttataatcttatatcctgaagctgcatcaactagtaaatttgcaatcggcatggggtattcatccttaggagtagctttgttcaaatctctgaaatcaacacataccctaagtttcccatttttcttgatcattggcactatattggaaatctattcagcatatcagcatggcctaatgaatttggcatcataaagtcttgttatttcagccctaataggatcatacatgtcagactcaaatcgtctctagggttgtttgaatggtcgatatcctggtttaatagacaactgatgttcaactatagatcggctaagtcctgtgatgtgaccaagactagggatggcagtattgcccatgggttcgggtatccgcagatacccggcccgatgggcacaggcatgggcacctttttttgcccgtgggcacgtctgacccgatacccgtgaacttagtgggcacgtgtgggttttatatttcgtccgtggataatccatgcccgacccgaaaatcttttagcccatgtatatccttcatgcggtcatgcctcgttgacaagttcagggatctcagatgaacttattcctcaatagtttaacctcccctcatggcccaatagcccgtttggcccatttgcatacaacaatatatacattcactcaaaaccctagcattatccttctcccaaacccaacctctcaatcttctatcggttctacgcggcggcggcgcaggggaaataaccaggaggcggctggcagcgcggcgtggcggtgcggcgatggctggcgacgaggtggctggcggctgggcagtgcctagcgacatggtggtgcacgagcgcgggcggcggctggggtgaggcgggtggcggggcagtggttggcgatgaggcggtgcacgagggcgggaggcggctggcgcgcggctggctccgcagcggcccacgagcgcggacggcggcgcaggcggcggctagcaacgcggcggcccgagcggtgaccggcgacgcggcggcgcacgagcggcggccggcggcacggcggagcatggcaggcaagcccagtgggtatccgtcgggcatgcccgtgcccgacgggcatgggcatgggtatgggattttgcccgatatgctttgcgggcgtgggtcgggcacgggcacgtgggtctcgggccgggcctggtttctctctgcccgtgcctgacccgacccgttgccatccctaaccaagaccactgctggttctatgctgttcttgtgaagcaagataaaacagagaataatgaaagtaaacagttgaagctgaatcgaattgttaaaattggctctatgctggttgagataaagctggcataggtttcatatttatttcttatcagtgtgggctcctattaggtgttagctaattactgtcattagtggcatcattacctagttgcattaattagattaattatactgggtttattttggtttgtttgggctttgatcgagcaagcccggagtgcatgttcatgggcttcgattaggactagtccagtatgcccttgtgcatataaataggccaagtggtcatgtaatttagattagattggttattgttttggttggtctagggtttaacccctgctgaaggtatagacagcgctcccatatgtttcctactgaagatcttgccgctggttggtttggaagaagagcgagtccaggtgattctttcgtccctggttgcactactcggtaccacaggttcctctcctttctgatcgtgtttattcaagcacgggtagatggaatatttatctagggtttggagtgcaatacattgtaagctgaagccagttatctattattgaatttttgttgccacttgaattatattttgtttgctgattggtaccgtgaaagagagggaaaaatcagggcgttcacagcctggtgctcatcaccctggcatctcatattattaccaagcaaaacaatctctgtattctttcaataattccactatttctttttaaatacatctaataattttgcactaatatatgtcggcctaggcctatcacctggtctaatatgaacttcctctaactcattggccaacataaacccttaacctagcttgccatctaaatcatctcctctgtccttggtgtagaaatttgatccctccacgatgccttcaaagtaaaagctggggctctccatctccaactggttgtataccacaaccagacacttttagataatctccttcccaaatctttcctaacaagaaatcaactccttccatctcccaaacagatagatcaacattagcaacagttactgacctgttggctggcacaatctctatttggtctgcctgccattaaatcaaactctggtgcatagtataaggaatgcaacaattagcatggatccaatctctccccagcaacacgctatatgaacccttcctatcaatgacaaaaaaatgtggttgaaattgtcttgctgccgatggtcaactccatattcaaaactccctttgtttctaaagaattcccccaaagtccttcaacaccatatttttttgatcaagtcctctggagctttacccagttttctgaaagttgtatatggcaccaagtttacagctgctcctccatcaaccagcatcttggacatgggtttcccattaacaaaagccttaacatataatggcttaaggtgccgatcctctgtgccttcaggtttctcaaaaacagcttgttgtggtgacaatatcaattagccatgaatagaagtaccggaaaggtacccggaaaagtcaagatcgtggcataacccaccgtttagtaccgtcctaaacaaagaagaccgacatagacttccacggccagtagaccctggataagtatttcttaacgatattactagaaatataattcccagcaatggcacagaaatattcctagtataatacgattacaaatatgaaccgcaagcgcatagatataccattgtagcatttcacccgaaagtattccaatgtatcgtatttatttaatcccaagggaagattgataagagaaaactatgctaatagtttatatattacttgtataagtcagagtcaaaacaggggtgaagcatctaggcccctggtgctaatttttggtaattaatgacaagcgctaattctggactaaccgttctattgagctatatattttaagttaggttcacattatgtgtgcgcatggatgtctaccgatggattaaaattgacggcgcaaagcaaaaggaagagaagacggtaaactagtgttttcattttaatttgatcaaggcgttgggcgatcaaaattatgctagtttatttatagctttactgtactattaagaggggtaatgacctagcaaagagatgatttaaattgccacattaggtcattgtgcatttagactagtgctaaaactcactttcatacacttgtatgtgatcagcctgaccaggggcggtcagaccggccacatagtggcggtctgactggcatgccctagccggtctgaccggccaacaaattaccgtgctccgcaggttagattagtgtggtccataatagtgtagttaaagattatctcattgcataattttacaataaataattctaagtcacggttgaactacaattgtgtgaggtcaagatttataattagtatttatctactatacacgtttatcatagactccttagttattgttcttgtgtatgatttaaatggactgtacagtagttgtgagtgcaatgacatactaatattagatatttactgagcatgagctatttactgtaagctatacagtatatgtgatgtaggtggatttggcgagttggtactgtttattaacttgagattgattaccaacttaaaagatactactccatggggcgtgacattaagtaattaattccttatagatgatttaatcacactagctctgttatcatttcgcataaacaagtcaaagactcatctatgtgtattcatattttatttacataatcacaaggctaaacttgctttaaataacctataagtcatgggtttaattatatggccattgaatattaaataagtactaatattgtcctatacatccattcatttgagacatcacttatacttaatttacatggttgctactgtgacaaaacatgctagaaacaaatattattacatttactctactgtacaataccaattctatttattagcatatttttaagttgaccataacctaatcatatgatattaattatttataattataaatatattttattaaatagtgaattacttcctccatttcacaatgtaagtcattctaacatttcccatattcgtattgatgttaatgaatctagatagatatatatgtctagattcattagtatcaatatgaatgtgagaaatgctagaatgacttacattgtgaaacggagggagtatataccattggaaagcttatgaatttaggttcaagtttcactcaaatccgagttaaaatgaataagttatgctaggtaaagattcaaatttgaattaatccgagaaattgtaaaaaggcactgttcataattcatttatttttaatccaaaatatatccttatccctaacagctgctgacatgtggggtcaaagctttgattttctttttcatataattaattttccaaaggaaataggaggagtggagacggctcgtcagtggctcggctggaggtcgtcttcaacctcccgactgagcggaagtagcgagggaggatgcggctgggcgcggccgggttggcgcgaggccggcacggcggcggccgaggaaggtgcggcgagctcgagcgacccaccgactgcggcagcggcgcgtggcggagagagggcgagtggcgcagcatggacacgccatggcccgagctcgggttgcaaggggatagggtgctagggctaggatccaacaaaattgatgggagcgtgaacatctacggggtatggggattcgatttcaccagctagatggagaggggagttcccgggatggcttgtcacggcgacctcaccgacggcgcaatggcggccaggccggcacggccacaggtactagttggcaaaattggagctggcgctagctattagagggttagaggatgctacgtgcgcgagggtgtaccgtgagaaggcgagacggcgaaacgcggcggagtagggctcggtgtgtcgcggcacagaggcaaacagcgttgatggcgcccgaaagtgttcgtcagcgttccttgacgtccaacctccccaacggcgacagcggcagcgtcgctccgcctccatttcctccaacctccagctccggccggggagcccctcaatggtggtctctagtagcggtgagatcatgcatagaaggtgctcgatgaaatgtatttgagggcaaaagacagagagaaagggggtttttatggggcttggcttagggataagccagaatggcatggaggataaaatcggcggctggcgcactcgatggctgtctacggtctaggttagggaagttgacgcggctaaagttgtgttcgggaggaggggttgggaaccctcctccccggcacaaaaaacaaagcgcctattattgcagaggtggcatggtcggtcgcgtgcgcggcgtccgggcgcgagcgcggatgcggagggatgaggcgcgaggggagggaggcgcggcacatagaagcggcgcgggtggagttgggttggcgcacggctgcgcgcgtgcgggatggatgtgggcagacacgggcgtggctggctcagtcggtttgggccacaacttgatcgagcacctggcggcccatgaacagttgcgccaggaaaagaaaaagaaagagaagagaaaggataagggaaaaaggaagggttaatctgtaaatttgccaggaaacctaatttaacatttaatatccaaaaatctagattttactcaaaagttgtgatggcacaattatatttccattgcattatttaaattaggtttaatcccaaatattagcctagacaattttgggggcgttgatatatcttaggagtttattaaaataatctaagtagacatagtgatggtgtgttgctccattactttacacgaccgtttattttatatgaatgaattttatgccctgagagacttgataaagtgttttaaatatttatttaaatattctagcgaaacactcttttataatgggattagtgtaatgaggtggtcattatttcatgtgagattggattcagatgaattcgatttaatcttactgtttccatttgttaaataatcaaacatggtttgaatatttaatatttgatttgtaatttatccaatagaaattactccctccgtttcacattgtaagtcattctagcatttcccacattcatattgatattaatgaatatagctagatatatatgtctagattcattaacatcaatctagctagattcattaacatcaatatgaatgtgggaaatgctagaatgacttacattgtgaaatggaggaactaataattaacttttccttcatttagctttctgccttgtgcataatatttatggaatcgatagatagcgtattcttgcaaattgtacatctttaatttaatgtttcattgtgacaatttatagtttggcaagcaatagcaaccataacatctagcatgatgcaaaagttttaaaaagttcgaaattttagttatttttattgttgtcaggatgttacacaacccgtgcacgtgaaggtataccatactcgtatattccataagtcgtaggataggaggtatgacttatccgtaaccatgacaaaagttaaattgctttaagtgcgacgaaatttatagacaaatattgaaatatttacattaccaaattagttttattaaattagtaattaaatatatttttataataaatttatcttggttcgaaaatattactatttttttctataaacttggtcaaacttgaagtagtttgactttcaccaaagtcaaaacatcttataagctgaaacggtgggagtcgaggggagcgatactgcgagagattgacgacgacgcgccacggcggtgtctcgctatgtatgtttggttcccttttggctcgggctagtatggtgggttgtgttgagaaaccagtttattctactgatcaacacacaagcagataaacacagagctgtggaacatagaaaatataagcgagtggaagctttatttcttctgtatttgagtacaagctacaagaggagaggcaggagactgaagatcggttgtcctcgccttggaccttctgggccctatttataggcggaggagggtagaggcttgcatcgtaagccttgaaccttctggcttgcgtcgtaagccggcttacgccgtaagctagcttctcctgtaagctggcctctggtgtaagctttcttctgtagtaagcttcccactcataatttaattcgtccacaataagataggtttcataacactaccccttggacgaatttgaattatgcacatgcctcatcaaaatctcctcccaaaaacccagtgggaaaaaatggtaggagaaaagagtacatggcactctgaatattgtgttgcacctgttgcctcgttaaaaaccttttgtgagaaaaacccaatgggaaaaaaaaactcaccaagggaaaaagagtacaacagttggtcaagtcttcaggacttgtttgtgattcttcaggatcacaatcatgggctattctcttaattgtttgctccccctgatccttgcaattcactaagtcgtctcatgccaatgccacgaacatatttgtaaaaatttgatgctggcagagacttcgtaaataaatctgcgagattttcgcatgacttagtttgtaggacatttatctccccgctcttctggagctcatggggataaaagaatttgggagcaatatgctttgtgaaattgcttttcacatagcccatatgtacttgtgcaacacaagcagcattatcctcatagataatggtgggggtgttatcaatatttaggccacatgacttctggatgtaaccgatcatccgcctaagccacacacattctcgtgtggcctcatatagagcaattatttctgagtggttggttgacgttgcaaccagggtctgctttatagaccgtcaggaaatggtagtattaccacaaagaaatacaaacccagtttgggatctggcattatgaggatcagacatatagccagcatccacatatcccaccatggatggatcttggttcttcgggaaccacaacccaagatcttgagtacctcgaaggtacttgaggatagttttgacgccaatccaatgtcttctgtttggggttgcactatatctagccaatagattaactgcaaaagcaatatcaggtctcgtgcaattggctagatacattagtgctccaatggcgcttaagtagggaacttcgggtcccaacatttcctcatcatcttccttgggtttaaatgggtccttatctgcttccagggattggaccaccatgggggttttcaaaggatgacatttatccatattgaacttaccaaggaccctcttggtataggtagactggtgcataaacactccttcagggagatgctcgagcagcagcccaagtagaacttggttttccccaagtccttcatctcaaactcggtcttaagataagccattgcttctttaatgtcctctgtggtgccaatgatattaagatcatcgacatagactgagatgatacaaaatccattcagggatttctttatgaacacacagggacaatcatcattgtttcaatccgtataatgatcgctgcaggcgaacactatacatgttgcaatttcttttcggattcagaatcttgagtccttcagggaccctcatataaatttctgaatctagtgatccatacaagtatgcagtcactacatccatcaactgcatatccaagtttatattagttgccattgagatcaagtatcgaaacgtgattccactcatcacaggagagtaagtttcatcatagtcaataccggtctctgcgtgaacccttgtgccactagcctcgctttatacctcaccacctggccattcctcttccggaggaagacccatttgcatcctacagggatgattcttggaggtgttgggactgcaggcccaaaaacctctcttttataaagcgagcgcatccttgcctctattgatgctttccatttgtcccaatctgagcgcttctagcactcaatcatggactttagttctggatccggatccattatgacggcaacctttgaggcaaagtgaatgtcgacaatagtggtctttctatgatgtaactctcctgtatcagcatagttagtggaaatctcctcatttatttcctccaacttgtcgtgatttcccataacgaccgagttggggtgttccgatcttccagtgccaaggtgcacgcgtaaggcactgggtcctccatcttcaggatagtgtccttcaggttgagttgccacttatggggctttctcaacttcaggttgagcttcttcaactgattctttgagtggaacaagtggctcagatccttgtctccgcggacgtctccgcggaaccttgtcccgagcacccagaggtctccccctcttcctaggatgggaggtaagagcatagtcagtaaccttatgggttacctctactctttttggagcatttactgcaggtatagcgaccttgtcactcccttgtaatcagtgaaggcatctggcaacttatttgcaagattttgcaaatttatgattctctgaacttccagttcagcttcactagtgcgtggatctaaggactgtatcgcagttgcattccatattatatcttggcattcttctggatgcctttctccccctaatgctgggaaatggtcctcatcaaagatacaatcagcgtaccgagccttatgaagatccccagtcataggctcaagatacttgattatggacaaagtctcataaccaacgtatatccccaacttccggtggggtcccatagaagtacgctgtggtggtgggatcggcacatatactgcacagccgaatttacgcagatgggaaatacttggttcttttccacgcactagctgaaggggggatgtactatgatatgtagttggcctgagttgaattagtgttgctgcatgcaacacagcatggccccaacaattggttggcagcctacaatcctgcaacagtggccgtgcaatcaacttgatcctcttgatcaaggactcagctaggctattttgagtgtggatatgtggtactgaatattctaccttaatgcccatggctaaacaataatcatcaaaagccttcgacctgaactcaccagcattatccatttgaatggattgtacgcggctatcagggaagctagcttttagcctgatgatttgggcaattagctttgaaaaagcatggttccttatggacaacaggtccacatggctccacctggtaaaagcatcaatcagtaccatgaaatacctaaacgggcctgacaggggctggataggtccacatatgtcaccctgtatcctttccaggaaaacaggtgacacatccctaatcttcaggagggatggcctaatgatcaacttcccttttgcacaagcagggcaaataaaatcttcaggattagggaagtctttggtttcaacattgtggccagtagaattattgatgattctcctcatcatacccaacccaggatgacccagtctgtcatgccaaactctaaatgactctgggcttctaaatatggttttcatcgcaacatattcctcagtgggttttatgtacgtgtagtacaaacccaatggcgatgaagggagcctttccaccacttgcttttgatatccatctattttggttatgagaagatattcaacatcttgctcaatctcggtttctatatggaaaccgtttgcacggatatctttaaagcttaagagggtacgctttgaatcaggatacaatagagcatcctttacaaagatatgggtacccatagggagaactagagtagcacttccggtgcctactatatgagcattgcttccggcaatggtcataatatttccagttttcttagttaaggtgtggaaatatctagtttcccttaagattgtattagtggtggcactgtctagtagacatatatcctcttctgccatgggatacccacccaagtatgtttatggaacataaacataaatgaaactagatgaataccccgcgcgttgctgcgggattttgtaaaaataatttggatgaaattcgtatggatgatgttttaagagaagataatatgctacatgtaaaataaactaattccataggtagagagaaaaagagagaatcgatatagcaaacttaaatactcgctaccaaatgtttcaacagtacgtacacactcgtaatctagtacaacaattaaatatcttctctgcttaataaagggaaatgttaaacccttgtgcatattttgttcactcgcttattgcttactattcctctctcctgcttcaggttaggttggagtctactgcacgcctcctcaaattcagtgtttgatttggggtaagtgaaattccgatcttttaattcagtgaaacctaacagtccctaaaacatgtatcttgttgtcaaaggatcaagaaaaaaaattggacaacaacaaaaagatacaaactcatatacacacacacttatccctataaaggcacatatgcacactctaactctatgaggcacctccgagagatagggccagcatatttttaacatttagttggtcaccgaaggacgttttgttctttgatggatacatcaccttcaactgaaaaacaattagccattcatgctcttacatgtttttttgttaggacacaattagagtaaagcacgtaataacaaattacacttagctactgaaatgtgccaaggaattcgatcagaccaaacaactctaagtcttataaaatcatgcccacagaaaagtacaaacaattttgaaggaccaattccggacacatcttagacccctagaaattggttttgtcgaatcgttcatgaaatgctaatatgattttagaaaaaggctcacctttatcatgtttattccaccataaactttaatttctcagagctgtttcagtgacttgcactcatgacacaggaagcaccaaaaacataagatttatttgactcaatatgattcaaaacaaagagatgagcatgtatatgttatctaaccatgtaaaacttaaagattagtgtgaaaattcagcaaccaacaactttacttggccattagttataaacaaaacttcaagctgaaattagcattgcctgacagcaattgcaatctgcactaagcaacccaaacttgtgaacaggggggtcaacaaacctagagcagcttgtttagaaaaaaaaatagtgattcagatttcaccatgctcctaagtcgtaaccatcaaatctctgaaactatcagatacgtacctgaattcattcccttcgcacatagcccaaatacatatccataaaccattaaccattattggatcaataaaaattgggggttaactattttcagcaatataatatatatgtatgtaagcaaaaaggtgatgcagaagtaacggaagaaacacagtgggagtggaccaaccttgatactgaagaagaagcaatgtgcaggatatggtacggtaacccaaattcccaatgtgaacgctgcatcaagaagaagaaaattatcatagcagcctcaacatatgcaactgcaaagaataaacagcaagacattctcacactcgcatgatccgaatatctgtttatggttctgagagccagatttaacttgcctgttgtgaatatgagaggagaggaattcaaagagagaccatgacggatgtagaactggagaggccggccgttttatacagggccatgagtaggcgatacgacgatcttgagtaaaattgttgcagggagtagagcacataacttgtattaaccactacgcctcctcacccaattaatttggcggtttttattgtaaatgcgggtgattaagggaggaagtgaataccgtctctaatgctgaagaggatgagggagggggcgtttgaagctggcatggtgctagggctcttcaaacgcgcgatacctgcagccgtgccaggctagggctacaggggcgcaacgctgcggtgtggctggcgcgtgggggacggcggaggcaatgcgacacggggaggagaagcgagcaagccggctggtgggcctgcacgtgctgggggaagcagccgctgggggaggggaatcgaccacaccgcatctcgcgcacacgcacgggggtggaagagaagcgagcgcggtgggcgaggggaatccgcatctacggcgggcccacagtgcaacttgcgtgggcgcatgctgggcggagaaagagcgcgcatctggcggcggctgagaaaggagaagaccgagcgcccagattagatcgcagattagattgaatggctgagattttacaggtgacgtggcttaaccacaaatcagctttgggtcttaattatatagaaagaagggattaaacatggagtaagtttattctattaagggaaacattacaaggacttcaggcccagtaaaagactaagcgtgctcttcaggagcattattcatgaccaaagttctacatgtgctactcatgccgaacactgcatatgactgacatataggagattacttcaggtctccaaatatgtcatcatctttttcaagaaggttgtctcaatcatcgtccatacggatgtccccaccatccttaacattgataagcatgtcatcatgcttttcaatctgagcttcaggctcaatggtgaagtgggactcatgttggctctttttctcattcatgctttgttggtacagctcaaccaggtgcttggggacatggcagttacgggaccaatgccctctgcctccacatctatagcagttatcctgcattaccccagatgattcacctgtaaccttcttgagttcgcctttacctctgggttacccttactcttgcccttgaatatgatacttcccttacctttccctttcttctcaccatggcctcttttacggccatgtgagtttccaacaacattggcttgtgcttcaggcactaccatagacctagtgggtcgagcagaatgattctttagaagaacctcattctgcctttctgcaactaacaggactgagataagatcagagtacttcgggtactttgagttcctgtattgctgttgcagcactatgttgttgggatgaaaggtagataaggttttctcgatcatctcagcgtcagtgatcttcaggccacataaatgcaactgagaaatgatcctatggtgggcagagttatacgccgccacagacttgtagtcttggaagcgtagggtgatccagtcatgttgtgcctgtgggagcacaattgacccttgctggtcaaagcgatccttcagggattgccataataccagtggatctttctcgatcatatactcagacttcaggtctaggtaaagatggtggcgcaagaaatgcaatgcctttgctttctcggccttcgtagactccacagtgccaacttcgggcagcacaatagtatgatcgagacccatggagtcgagtttaatctcaacgtccaatgcccaagtgaggtagttactaccatccaaggcaagctcggcgaattccttctttgctatgtccgacatgtcctgcaacatcatttggtatttacgacaggtaaatacgatgtgcagggtcaacatgaattggtcatgcgtaatcttcaggattactagtgtgtgtaatcttcaagattatcacacaatttcccatagaatctttcctagcaaattaacttaagtaatcttcaggattacagattgcttgattaaatattatcaatcatgctaggaaatcaatttcataacaataaaataaatgttatgaaagtcatgcaaacaacaaagtaagcatgtaaaacaaaatgaagagcattcatgggcacttcatgcatattgtgcccacgcttcatggtggcagagctgaccttagaggcgtcaagggcccatatgggtgatatccataaaacaaaggacatccataacgacacttcagggtcgtgcagaaggttcgtttgcctccgatatttggtggcaacggcggcagagccgtccattaagttgccatgccggtgcttcaggcacctacatcacctctagcatttgggcgataacggcagcagagccaccatcgtgttatcgaatagtgctaaggggatgtaccatctcaagcctttggacggtaatggtggcagagccgccatcatgttactgggtgttgctgagaggatgtatcaactttagcaattgaacgataatggcggcagagcagccatcatgttatcgtgtattgctgagaggatatcggaggatggtacttcaggtaccatgttcttctgcttatttcaactatagcagaaggataatttgcatatcaagagcaagatgatcagtagaaactgatttctcactggtttacctttttagctcgatagagtctcgtgctgataacgtgttgagaaaccagtttattctactgatcagcacacaagcagataaacacagagctgtggaacacagaaaatataagcgagtggaagctttatttcttctggatttgagtacaagctacaagaggagaagcaggagaccgaagatcggttgtccttgccttggaccttctgggccctatttataggcggaggagggtagaggcttgcatcgtaagccttgaaccttctggcttgtgtcgtaagccagcttacgccgtaagctagcttctcctgtaagctggcttcctctgtaagctggcttgcgccgtaagctagcttcttctgtaagctagcttctggtgttagctttcttctgtagtaagcttcccactcataatttaattcgtccacaataagataggtttcataacaggttgcaccagataccatggacgtgggcaagaacaacgtccccttgtggacgttgatacccacaaacgctgattcagtctgcgtccttattatttctctaaatccaatatagtactatgatttaccatttatttaattcattaaataataattactccctccattttaggttataagacattttgactttggtcaaagtcaaaatactctatgtttgactaattctgtagaaaaaagtaataatattttgtcgggtcccaaaactaataattcggaaactgacatgtttagactgtatcaagcccaagatcagtagattggtacaggttcaacaatctggatcttcattgcatacatttgaataaggctccgaaggtgacttctttacataaataatagggtatttacaagcttgtggctaactaacatagcagaagctataggatgacccaaccctaatgttttgctatagaattaaaccatctacctatgctagacttgggagctaagttggaatgagactaacttatatgattatatgattgaactcccggcttcggcaaaaactctaaattgattctgaaagagggggttaaagtaaaggtgagtacaatgtactcagcaagctattatatcaaatatgaattcatgaaatagaagtaattgagtagggctaggtttacttgcagaaagttgagattatagaagtagaaagcctgtaatatttggaatgcaacagtatttaataaaatcttgaattatgtttctaaccaagatgccatagttagtccctatgctcaatatccgtgagcataggtattcgaatagtttcaagaatattcatactacagtagatatatgctttacccgcaatccatgacatgccaatattcattagcttagtcacggcccagcttttcggtttctaacatcagtggtacctgttccatgaactctagtccccatgcactctgaacgtatgttatcagcagcgagaggagttctggcattcccggggtctttagagaggactgattgtatgacaccatgtcatcgcaatcagggtttacaaataattcgtgatatcacagtttatatcaaatatttacttgtacctcagtaaatatcaccattgccctactcggcataagtttgcctcctgtgcaaggacttaaatatagaaccactatagagagaggtaccacctttgctagataacttaattggctaggtctacacccatccgagaattgctgtcgtactcgttcgttcttcacaggtacttggcagtgcttatgttgatcgacataaaaaaaaagctcgaaagcatttacccaaattcgagctcgaaaactaaaaattaattgcgacgaggaaacacgttcgacctcgtcactcctttgaaacgtaagggggacggcggttttcgaacaaggttttgccttagctcgaaaacacgacataaaaaaaagctcgaaagcatttacccaaattcgagctcgaaaactaaaaagtaattgcgacgagggaaacacgttcgacctcgtcactccattgaaacgtaagggggacggcggttttcgaacaaggttttgccttagctcgaaaacatgacataaaaaaaagctcgaaagcatttacccaaattcgagctcgaaaactaaaaagtaattgcaacgagggaaacacgttcgacctcgtcactcctttgaaaagtaagggggacggtggttttcgagcaattttttgccttagctcgaaaacacgacataaaaaaagctcgaaagcatttacccaaatttgagctcgaaaactaaaaagtaattgcgacgagggaaacacgttcgacctcgtcactcctttgaaacgtaagggggacggcggttttcgaacaaggttttgccttagctcgaaaacacgacataaaaaaaagcttgaaagcatttacccaaattcgagctcgaaaactaaaaagtaattgcgacgagggaaacacgttcgacctcgtcactcctttgaaacgtaagggggacggcggtttccgaacaaggttttgccatagctcgaaaacacgacataaaaaatgctcgaaagcatttacccaaatttgagctcgaaaactaaaaagtaattgcgacgagggaaacacgttcgacctcgtcactcctttgaaacgtaagggggacggcggttttcgaacaaggttttgctttagctcgaaaacatgacataaaaagaagctcgaaagcatttacccaaattcgagctcgaaaactaaaaagtaattgcgacgagggaaacacgttcgacctcgtcactcctttgaaacgtaagggggacggcggttttcgaacaaggttttgccttagctcgaaaacacgacataaaaaaaagcttgaaagcatttacccaaattcgagctcgaaaactaaaaagtaattgcgacgagggaaacacgttcgacctcgtcactcctttgaaacgtaagggggacggcggttttcgaacaaggttttgccttagctcgaaaacacgacataaaaagaagctcgaaagcatttacccaaattcgagctcgaaaactaaaaagtaattgcgacgagggaaacacgttcgacctcgtcactcctttgaaacgtaaaggggacggcggttttcgaacaaggttttgccttagctcgaaaacacgacataaaaaaaagctcgaaagcatttacccaaattcgagctcgaaaactaaaaagtaattgcgacgagggaaacacgttcaaccttgtcactcctttgaaacgtaagggggacagcggttttcgaccaaggttttgccttagctcgaaaacaggacataaaaaaaagctcgaaagcatttacccaaattcgagctcgaaaactaaaaagtaattgcgacgagggaaacactttcgacctcgtcactcctttgaaacgtaagggggacggcggttttcgaacaaggttttgccttagctcgaaaacatgtcacatcctgaatttcgtttcaggatttttaaagtatttaataaattattattagaatttatattaaatgttcattaattttcaagtgaagttaaatgtgggaaataaaatttcctaaatataaaggatggatggatttaatttttattaaattcttcatggttaattatactctttggaattatctcggattttttcggagctcaattcctaattttaatcatacaaagaacatttcagtaattacccacatatttaattaataattaaatggtctaattataattttttatttactttgagtgtccaagtattttcaggatttttcttgaaattatttgagcattggaagtatttttaacaattcaaagatcatttaagtgattattttaattggaaaagtaataaaattctcctctcccttgtcttaggctgaatcggcccattcctttccttcctctctcttccgccggcccaacccgagcctgcatcctctcttcttctctcagccaaagtccggttttactccctcttctaatcaggctgagaaaagaaaagcccggcaagaagtctacttttcctccctgtcgctacagtgcgtcttcaagctccagccgccagccgagccgagtcggctgccatgccgagccgccttgccgcgccgaatccgccccaatctctccccttttcttccgtttttttttgaggggtttttatcctctcatcttcctctatccttacccccaaaaatcggagcaaatcgttgagtattttatccgaatcgaactcgttttgagtttatctccaaaaccgagtttttgatttcccggagcgatttcttgcgggaggagtccgatctattcaacccaaggctataaataggaccccctagtcctcctctttcgtttgccccctctcccgtgatctcccgtgcctcgtagcgccgccgccacgtgctccaccccgccatcgtcgccggccgagttccatccgcgtcgcgccgccgcctccgtcgtcgccgccggtcgccgtcaccaccgttaggtgcgcgggagggtggagaagcccggccgcctgacccccgaagccgccgaccaccgcagctccggcgccaccgccgaccgaagtcgtcgccgccgctcttcctctccgccggccgtcgtccgtcgtcgtttgtcgtatcggtgagcaccattgagttcgcaatgttgtcctctacgcgtatgtgtcctccaaaagtccggccgaccaccctagctccggcgaggtcgccacccgtgccgtggctgccgtcgatgacgtcatgacgtcatcatctcctctttttcagttttttttaatagattaaatcttcggaaattcataactaaatcatcgtaactcggttttgagtggttcaagttgctaaattcatctaaaatcatgatctttgtactgtttatttggtttttattagtctttttcctcgttttgcgtgttagcttgtcgtttccgtcattgcgaaggttcgtgagtgcgtcgggagtgttcagaagattaattgagaccgattattgcaaggcaagtcacacagatcctaaacacaatcatttgagcatgttgatcctatatttaaattctctatttattttaactgtgcatttattttcgaatgtcactgggtggtgtgaacctattcctttgttatggccaatctgcattgaatgccctattccttgataccttgggtaataaattgattagcttgaaccttatgtattggtttggttcagctaaatgttatatatataattgcttagccatgcttagaaacattagctcactaatgggatgaatcatatatactacattattatttatggttatatttaatggtagctcacgatggttaatcgtgttatgataattaattggtaattaaaatatgattaatggtgggttgtgagcacatggttttgaaggtcgtgctcatggcaattaaggaccggttcgcgagctactgttgtgaaacattaaccgtgccaaccacaagccagcgtgggcaacggctttaccttttgtatagcatggttcattgtggagcaccagactgagaagtggcggagataagcccacgggggtcgctggggagtccatgccttgttttataaggggtgattatgatccaggaatggtgtactgtggtgagttgtgttgtgcagagggtattgtcacagcctctattcgggtactttccagtatcgcgacgcatggtagacatgatgttgaggctgtgtcttgtaggtacagtggtacacctctggctagagtaaaactattcgaatagtcgtgcccgcggttatgggcgagttgagcaatgtttttcgtgattagtctcacgcctctcacaataattattgatgctataactggtaataatttgtttagctcctggtttggagttagatctgtacagccgggtatggttgttcaggatggttgggcctgtgcagcatgggtgtgttgttcagtgttgattaaaatttctgattaattactctactgttttactactcttaactctttgctaaatgctgctttcgcaaatgagactatattatgccatcctttggtatccttgtgcacttgcatatttgctgtgtggcttgttgagtatatcatatgctcattcttgcaataatcaatcaacctcagttgaagaaaagggatccagaaggagaagacgtttggcttataccccagttgagttgcctgtgggagtggagctgaagccatcgctagaccgttaattccgctgctgtttttcttttcttttgtaagtatgtaacgttattattatgatggatttgtatattaaattgtcagtttgtgtacctcggctgatttctggacgaggattttatgcacaaattagtttggaaattattagtgaatttccgggcgtgacaaaacacgacataaaaggaagctcgaaagcatttacccaaattcgagctcgaaaactaaaaagtaattgtgacgagggaaacacgttcgacctcgtcactcctttgaaacgtaagggggacggcgtttttcgaacaaggttttgccttagctcgaaaacacgacataaaaaaaagctcgaaagtatttacccaaattcgagctcgaaaactaaatagtaattgcgacgagggaaacacgttcgacctcgtcactcctttgaaacgtaagggggacggcggttttcgaccaaggttttgccttagctcgaaaacacgacataaaaaaaagctcgaaagcatttacccaaattcgagctcgaaaactaaaaagtaattgcgatgagggaaacacgttcgacctcgtcactcctttgaaacgtaagggggacggcggttttcgaacaaggttttgccttagctcgaaaacacgacataaaaagaagctcgaaagcatttacccaaattcgagctcgaaaactaaaaagtagttgcgatgagggaaacacgttcgacctcgtcactcctttgaaacgtaagggggacggcggttttcgaacaaggttttgccttagctcgaaaacacgacataaaaagaagctcgaaagcatttacccaaattcgagctcgaaaactaaaaagtaattgcgacgagggaaacatgttcgacctcgtcactcctttgaaacgtaagggggacggcggttttcgaacaaggttttgccttagctcgaaaacatgacataaaaaaaagctcaaaagcatttacccaaattcgagctcgaaaactaaaaagtaattgcgacgagggaaacacgttcgacctcgtcactcctttgaaacgtaagggggacggcggttttcgaacaaggttttaccttagctcgaaaacacgacataaaaagaagctcgaaagcatatacccaaattcgagctcgaaaactaaaaagtaattgcgacgagggaaacacgttcgacctcgtcactcctttgaaacatatgggggacggcggttttcgaacaaggttttgccttagctcgaaaacacgacataaaaaaaagctcgaaagcatttacccaaattcgagctcgaaaactaaaaagtaattgcgacgagggaaacacgttcgacctcgtcactcctttgaaacgtaagggggacgggggttttcgagcaattttttgccttagctcgaaaacacgacataaaaaaagctcgaaagcatttacccaaattggagctcgaaaactaaaaagtaattgcgacgagggaaacacgttcgacctcatcactcctttgaaacgtaagggggacggcggttttcgaacaaggttttgccttagctcgaaaacacgacataaaaaaaagcttgaaaacatttacccaaattcgagctcgaaaactaaaaagtaattgcgacgagggaaacacgttcgacctcgtcactcctttgaaacgtaagggggacggcggttttcaaacaaggttttgccttggctcgaaaacacgacataaaaaaagcttgaaagcatttacccaaattcgagctagaaaactaaaaagtaattgcgacgagggaaacacgttcgacctcgtcactcctttgaaacgttagggggacggcggttttcgagcaattttttgccttagctcgaaaacacgacataaaaaaagctctaaagcatttacccaaattcgagctcgaaaactaaaaagtaattgcgacgatgaagttgatgcattcaaactgagaattctgctttgtgtagtgccgagcgatatggaaatatgcaaattccccgccatgcggagttccaccgcagctatctcaatgatgttttcgaccgaacagggggacggcggttactcccctgcatttttgatctagcacggtttcggccgaaaacacttcgcccttacccgtgaggggcttgttgtagcaggtggtaaacaccatcccccatgcccggccgaaaacatatgtcaagaaggaaaatgtgttcgagttatttattgactcgaatgaagtttccacccaaaaagtagttttaggtatgggaatatatatgtattcaccctaaaggatctgtcccaaggaaaaagcattcgagtaaagttacttgctcaaactaacatcactaattaatgaagctgtgtttcaggcaggttaaggtgacaaggagcctgaaaggtgggagaatgtgttcgagccttagcacgggtgatctcactcgagcatatgaagttgaggaaaagtgccattgagcaaatggtctaatttgggaaagtaccatggggaccacctcaaccactctcaccagctagcaccagatgtcatttagggaccaccagaatgtaccaaaatgcccctataggtcataaactttataggggtaaaatggtaacttcatgtaagcctgtaatgacaaacttgtaaatcttggacatgcggttgagcactatttaagccaaccaagatcctgtaagcacgggaggagatgaatatagaaaaagcacattcattcactttggtatttgtcttttgagctcactcttaggatagacgggaaattacattttcccttctatctcccaactttgtccatgcccttaggtcacgacaacaattatgctcaaagggggggaataataacttgccttgctccaacgcaaataaatccgagataagcaacctgattatccgatcctcgaaatatcacaggttgtcatccaaaatataatagattctactaaagaagaggaagaaccaaattcaataaaagccataaaataacaagagaacgataaacaactaggagggctagggtttagggtataatctatctcttctataggatatagggattatatttcatatgtaggttctaaagggttgtaggctaggttggatagaggattaagcaactattgttgcttacattttatgtatgggctttggttgtttggagatacagagtatattaggtaattgaactggctaagtaggcatatggctagtattagctggtgataggtttaggtagtatagtgtctggggtttggttatatttaagccgattgtggagtagggaagcatatcggctagggtttggttgtttactagtcgttgctagagttgggcagtataacgactaggtttggtattttctctagttggtgtcaacagatagcatatcggctagaggaataggaggttggtgcaggtttagcggggcggaagtgttactccgacaaccgtgggtggcggcggagtggctaggatcacacagagcccgagagctaactgtgcagcgtgcggtggaggtcaagggaatagtgaagctctgaccgctgtacgcatcaaggcgtggggtgccaagagcagcacttaaaccttgggtttggttctaccgggctttacaaccaatgatctgacatcgggacccgtagaccgcatgaacgtccccatggaagacgtaaagttccaaccggcggctttttagtagctaataggtattttgggataaagggaaatatttgaaaggtaaatatatgtttaaattggatattcaaataaaatattaaaatagtaaatttagtatcaaaatgtagattttgaatttagatgaatttggggaatggatttgcctcgtcgaggcaaagcttatggcgcgagggtttggccggcgtgtctctggtgaaggagatcgacggcggccggtggtggttgccatggtggggagagagagagaggaagagcttgaggctttgttgatgtgtggagaaaaggggagggctcgccttctatttataggcagcgagaggttggttcgtaaaggaggaggagaaggacgacatggcgacggcggcgtggagaagaggagcacggcggcggctctgtctccgattggacgatggagtcggttcggctagcggttgacgtcagcgaggtgaggtggcggctgacgtcggtggcagtagcggtggagaaggagcaacaaggccgcacagcgatggcgcgtcggctcggcgaaaaggcagcggcgtgtttgcatgcaccacgcgcgctcacaaaggagggagagaggcgcctgcctcttgggccctctgggccaagcgaaggggaaaaggaatgggctagattgaaattttttggcccacagtgaataaaaaatctttttgtattttcgaattagatttgaaggatgaaatttgaatccaaattaatatttggaagaaatttaggtggctaacttttgagatgaacttatttttagaaatagttttcaaaagagagatttcctaattatttgagtgcaataattttgagagatggaaactggtagtatgaatatttgaagaaatatttgtggctaatagggaattaatttggaagagaggaataaaataaaaatctattcttcttagcacaagagaaatcattctgatatttataatactgttattcttgaaccgaggaggaaattaagccacataaattaaattggcgactagataaaaaggaggaatttggataaggataggtttagaatcaaaggatgggtcaacaattaattcaaaattggaattggaggattttcttggaccataattcataaaagtagaaagggttttcaaactaaatttcaataaaagaattttagtcgaaagaaggtttaatgtaggattccatcaagaaatacctcaatttaaccaaatatatttctctactgcttaaaaaaaataagagatgctttcttcatcgtcgaaacaaaaataatagcgaaaaaaaataaaaaaagtccgactcccgtcaaaacaaaaacaatagcgaaaaataaaaaataaaaaagtccgactcctatatccattcccttttagaaacgaaaaaaagtccgactctggattggtgaaaaaaattgatgagccgaactgaaaatctgtttaaaaaatagaacctacaggtcgagatcatttcatttttatatgattttaatttttgggtttgtacttttgcatttgagtctctataatttttatatttacatttgagtccctataatcttgcaataaggtatttgaggtcgtttttgttaaaaaaataataaaagagagaaaataaaggcagaaaggtgcataaaaagaaaaagaaaagccgcacaaaaaagaaaataaagaaaaacaacgataacaaaagtttttttcccctaagtggccaaaaaaactgtagatccaaataaaaaaaaatctgattcatataaaaggcaaaaaaaagtggtgaaaaaaaaggctagaaccgattcctttaaaaacaggaaaaaaaagtctaattcctataaaggcgaaaaaaatccgaaaaaacatctaaaaaagttcgtccgattccctaagaaagtggcgaaaaaaatggttcttaaaaaataaaaaactggttcatataaaataaaaaatgcacgcgaaaaaaaatttggaaagggcggaaaaaatcctatttctaacaagtatatatctcttctctatctctaatctaatctaactattaaaaaaagagaaaatacacgagaaaaaaaggttaaaaaaacgcgtgaggcaaaagtcagaaaaagctcaaaaaaacacgctaaaaaggttttccatcttcaataaaaaaataaaaaaacacgcgagaaaaattatttccatcgtcggtaaaaaaattttaaaaaaacatgcgaggaaaaactgtcagaaaaaacatgccatttctaaaaaatggttttaaaaaaccacgcaagaaaaaataccgtctattaaaaaataaatcgctctaaaaaaactatcagaaaaaagctaaattgatggacacttgagtcggataggattcatcgattttttgccatctactacacggcttttattttgtcatatattctcctgtattagaaaaaagaaaaaaagaacattcgaaaaaaaacaagcaaaaaaacgtgcgagaaaacaggcaaaaaaacaaacgagaaaagaaaagcaaaaaaaggagaaaaatatggttttctttgtcagtaaaaaaagcaaaaaaaatgctaggaaaaaactgttagaaagaaatacgccatttctgaaaaatggtttgagaaaatctcgcaagaaaaaaacattgtttataaaaaacaagccgctcattaaaataaaacattgtcattgacatgattatgcatgaaaaacgtatattttcattagaatgtttttacccattgcaacgcacgggtatttttgctagttaaatgaaaaatacgaaagaaattaaataaaaggagaggttttatgcgacttagttttaggagttccctctaattataattataatgtccttggtttaggaggttattaagaatataagaatcaacatgatgcataattagaaaataattaattttcgggatgttatatatttataacatcaatatagttttattaaatatacaattgaataaatttttataataaatttatcttgagttaaaaatattactattttttttctataaaagtagtaaaatttaaaatagtttgactttgaccaaattcaaaacgtactgtaacctgaaacactgtaccaaaaaattcggttcaaatagcccccccccccccccccccccataatccacgtgttccaaacaaccaattggctcctacccgttatctttgtgtttccatccagtgaaccccacctcatcattctatatttctatgattctatcccctccagatttatcggcgcctcaaatccccagtcgaccagggtgctcccaacaagaatcccaccgccaccggtcgccatggctgcggtcgccaacaccgtcacaaccctccccctccttccctcccctcatgccttcgccgtgcccgcaatgggctcgctgcccttcctccggcgccgaatgcgctcccgtcgcctcgccgctgtccagcaggatgcggccgtctggacccccgcccccgtctcctccttcggcccagccaccgccgacggctcgctcgtccacttctccgtggacctctccgacgctaccgacctcgccgcatcctacaccacgccggggcagtatctcctaatccgcgtccccggcgaggatgagctcaaaccggcgttcatggccatcgcctcgccgcctgggggtgccgcgttcgagttcttggtcaagaccgtacctggtaccacggcggagaagctgtgtgggctccgcgacggggacgtgctggagcttggcgcgataatgggtaatgggttccccatcagcaggataaatccgcccgatgaggcgcaaactgtgctcctctttgctacagggaccgggatcaggtgattgcttctctctctgatgaatgcttgtttttgtatatatgctgagctgagtttaatgtggttaacactgcaatagtcagttgtcacacatattgctttattagtagcattttgcagtttacacatagtgaagcttttaaaatagttctgagctataacaaatttcatatgtataagcttagagatatcgcaatgttcttcagtaattttgaacatgttgtcactgtaatgcaacttgtttcttttgatgtatctcattaatcggacgactcatttacttactataatccagtttgctaaaataaataaaggctgacttagcggaagaatgcaagatgagaaaataacagtatcgtcgagcaacagtatctctaataataaccgtaggtgctgacataattgtgttatctattacttatgcatataaatcaagcctagaaaattagtacctcacctttggttctttcctaaaaaaatgccttttgtttttgttttgctaaggatcaaacattccttacagatgaaatagatcacaaaagaattacctatatgaaaaattaacatgagaaatggatggtatgtgtacgaagattagcaattacgctatactgcattacatacttttatttaaatggcatgtttactacagcagtatggtgaggcaacgcactttgccttacagcatatgcaatgtgacacaagttgagatggcttgttaaacagcatgtgatcctgggcctgttggggcacacaccctctggccaccatccctggtcagtagtcatgccaaaatttgcagcggtggctaggcggaagaaatagccaaaccttagttgtgttgactgtttgattgctagccttgataaaccatatcaagatttggttacaaccgatatctgggcatgacaaaatgtttggcattgaaggattgggtagatagcatgctgttttggcaaataggtagggtagcgggtagcctttggcttgagcaaggtaaaatgccaatatgtatatgactatgacgaattggtggttctaccttccttctattactctctatgtaaaaaaaagtgaattttctatgactggactgactgggctaagttatgagaaatagatttttcctaaatggattacaaaataaatacttttagtttagaatatatgatcttttaagcattagtactaaataaaccaatagcatatttcatgcatccaatcaccaccttccatgtcagcccagctgccccagcatgctgattgggcagcaaaagattgtgagctgtttgtttcccatcgaatggtctgcagattggctagttttggcttagtattactaatttcctttcgcatgccaatttttttaataagccaaatagtgggcaatttcctttggctttctcaatttttagtacgaaatttgtataggttaatcagcactcttggttttgttgatctgcttggccatcaccccccatttagccccaaatattcttgtagggaaacatgtaagaaagtaggacttaagctaacttaatatcatgtaatcaagggtttaaaagaatcatgattttcatgtctttgtctcatggcccatgggcccaaaatggcgatggcagttatcatggaagatatcgtattctgtgaaagctaagcttataatatagcaatactttttcttcaagggaaaacttatatcatatgtcactactcgaaattgattaggaaaagtaaaaaaaaaatagtttttacatataaagcatgtaaaaccgaacattaaactaatttgccagtttaatatctgttcatgtgaaattttaagagtattgaagattcaaagtagtctcttattcgtaagaagccatagaggcaaacataaagtaaagcaaagaaaaagaaaattaaagaaaaacattactccctccttcccaaattgatcatcatattttatgcatcaagaccaatgataatttaaatcacatcaatcaagtcatcatgaacacattctcccacaatgcatgcatcgattaaaacatcattccagttagagcaagtttaatagtatagctaactactagctccatatcatttatagccaatgtaatagccaattcatacaatagttgcttacaacactattaatacatgatcctacacactgtatgtcttggagtctgtgctgcagctggctacagatctgtagcccgctgctcttctctctcttcctttatctcattaaaatatgtttatagctggcttatagcctgttattgtacctgctcttacaccttagcatgcacacattctcccatgttgtattaattgtattctgatgaaatctgtgtccatgcggttatatgatgatcaatttgagaaattttgaattccattatgtgatgatcaatttgggaaggagggagtagatgccaatgttaatgtctcatagctgcctgtgggaattcgcttggatatttgttttacaaaatcatgagctgcaattaggagttcgatcgtcttagttagcatgcgagtttttttaaagagatttcttatacgactccttctgtatttctaaaagcgaacgaacttaaaaaccgactcaaacacggatgacataccaaaggaccggcataaacatcttcaatttttataatagtagagattaaatagaaaaatgcatttgtactgtagtagtaaagagaacaatgcataaagttaaatagataaatgcatttgtactatagtagtaagggttctgctttctctttctgctcctatatgtttttgaatggttgtaccaatttactggacctaaaatgaactattgcttcacatttgttagaatattgtgagaatgtttagttccctttcctcaccatcaaagcaaacttagttagcgtttggcaaggacatgtacatgattttattttttttttttgaccaagggtatgaagcccccatttccattactagaaatgagcatactacagagttctttcatacaaaggaaacaaggactaccagcaagctagttttctgaggaaactacatccaaaatacggttttccagaagactccaaccaaaatctcccctatgacacaaaggactcaactccctgcagttttaaagtaaagctaagacacctaagaatccaaagaccatagcaaggcagcagccaccacaggtcttcaaatctaagctgacttcacagtccaatccttcttgcgcctcctctcaatccatacttggaattgaagatctcatttgctacctgtcttatgagtttggcccccaatagcagccttctttgatctacctccactttctgcaaaggaacccaagattcaatccaatggcaaacaaagaaaactacatcagttggatcattaggaaattttttgtcaaaacaagctttttgttccttgttttccaaatagcccaaaacactgcagccaccccagtgactaccagatttttaagttttttcccaaacgcagaaagccatgtgccaaataactgattactgttcaggataggtcccaaattaaaagcacacatgacaatgttccagatcaacctagcaatagggcaatcgaaaaaaagatgttggagtttcatgatagtttcactaacatgtacatgatgttagttggcgtttgtcaaggacgtgtattttgtttgtaactacccaagagcaggaaaaggtttccttgcttctaagggagatcagcatgctgttatcttatttgctggataggaaagacagggctaaatatgtcttgaatgctgatacatcttttacgataatttagtctgattccatattgttgctgactgtctggttttggtgatcaagtatagtctggcatccttttgatggaatcctacccaggttaatttgtatgttaatcatgcagtccggttcggtcacttattgagtttggttttgctgcggatcaaagagctgatgtacgactttattacggtgccagaaatctccaaacaatggcatatcaggttgagacttggaactttccttcattctgctctatgtaaacaatatcttcacataaaccttttctctctggcaggataggtttacaaactgggagtcaactgggcttaaaataataccggtattgtcacgagcagatgatagttggaaaggagaacggggatatgttcaggtaatatatgaaaactccaacattactataatcttgttatatgttcataggtacatacaaccttatatcatatcattttcattttccaggatgctttcttgaaagcccagaacatagcaaatcatttttctactggggcagtgctctgtggacaaaaacaaatgtctgaggcatgtttatcctctcttttttttttttacttttgcacattcctattgttatgtgtgctacaggttacaaatattatgtttggttcttctggccaaagagctgaaaccttaaggatataattcaatactgtgcagtaaatactccaaaagtgaaccttttttttctaggccgatagctatttgttcccaaaaaaagaaaaataatttacacttactgtagcaatcaaatgttgccctgcactttgtagcaatcaaatgttgccctgcgcttagtgtagttcctagattcttatcataattgtgataaacccaatgctgtctgttgcaagaaatatagctatatcaaaccaccactagctcttgcactttattttgtgtgctcagatctgtattacatcttgagataaagctaatttgattcaccctgaaattttattgaactctgcaagttgcagtcaggagctagtaatgttagtttgcacacttatgaattggagtataatccacatcatgaagtgtccaatacatacgtttaatcaatataaaattcagatttgggtacaaaatgctactctccattccacaatgtaagatgttttggtctctccatcactcgtctatatttactaacatccttatgaatttagacatatatgaagcacatacttagatccatgcatgaatctattcaaaacccaaaatgtcttatattgtgaaatagaggaagtattataccatcaatgtgcatgtggtaagtaaaattttaagaagattgaatttagttcaactataataattataatattatttattgagaagcaaagctaaatatttgttgatatttttatatatattataatagaaaacaatggttaaagttattttttggagaccatgtcattgtccaaaacgatttgtggtaagttgatgtcatcttctttggtgacaatagatgtaactaggggttggcaacggagtggggcgggtgtggattggacaagaacaaccccagccccagggtgaagagtggggcgaaatcagtccctggccactctgaggacggaagtggaagatgaagcgacacatcagaggaataggaggtcaaggccagccatcagccaccgtcgaccaccacgctttaggatagaggaatatgaggttgaggccagctgcagtgtcgtaggagccctggccgctacttcatcgggatgcagagtcaaggtcaagggataggtccgcaacgacgaacgtagcatagtggtttggctacatgcgttctagtgcagatcaagggacacgatgtcgaaggggaggtctgcgatggtggtgtgggatggatttgtggggaccgagagattgacataacgggatagggttttcttgatgggcttttgtggagtatgtattttctcatctcctatgtatacggggccttgccgatcaccgtggatgaaacatataacccgcctccgcccctcggaagcagtaagtgcctcaccccgatcaactcgtgggtgagaaaattgcctaggccctagacccaatggagaaactaccacccttagttctatctagttcaagttagtattgttggttaagaaagcagcactacgcagatagcttaagtttctaacgtaagtacgaccttctcctgtgttaatgatgtgaacatttgttttcagagtagggttgtggttggttgcaccacggtgcaccacttctccggagtagcacaataatgttaccatatgcttgagcgtgatgaggagtccttcatgacctcactttttagataatatgcacatggaccacgaatgtgtaacaatctgttggcaaattggaattactccacctaagaggtttaaggaggaatatgccaaacaacctccatgtggccatgtgcctcactcacactttccaatggcgtttgatagaggacatcacagccaaaccagttgccaagccaactgcgtccaatgagccaccttcaatgcttacagcaatgccctaacagggcgctagcgaccctcacccccaatgtaaggccttatgtcttggtccaatcaactcacccaaagaaaatggggttaattaaattcatgccatagcaaatttcacggtttggaaaaataccactactatttacctatttatagccataccattgcaatacatataaaattggattcatgccactttgtacacttcaggcccgttttgaaatgttcttttgctattgtattttcatagtgaccaaaatacccctggtcccatttctcacatgggacccacatgtcagatccatcatcttcctccactctgcctctcttctttggataagccatacccatgggggtagtacacagcggaggactcgtccacctcgaccgtcactgccagccagcccctcgcaggcttgtccgcgcgcgctgccggagccatggctgagagtagtagcaggatcaggccgacaagctgaccgacctggccgctatgggaggaggtctgcctttgcagaagcaccctggacaggagaggagatttgctagctcccgtcatctgatttgtccctttccccttaatattttttcagttttctagttttcttcagaagctaccgttattattttttaagttttcttcagaagataccgctggttggagcttcgtttccactgcacctcgagcctggcggagagcacaattcaggtcgcggcttcgtcggatgctactattgtcactgcctccactatcaggagccgtccctgcaaaccatcggaagagcttgtggagagagtgggaagaggaagattgggaagggtggaggaagatgaacttgacaggtgggtcctatggggataggacgaggggtattttggtccctacgaaaatacagtagcaaaaatacgtttcaaacatgtttgagttgtatagagtggcatggatccgatttcagatgtattgcagtggcatagttaaaaataggtgaatagtaatggtatttttctaaatcgtgaaatttgtgatggcatggatctaattaacccaagaaaatgaccaatcgaacccaggcggctatgttagaattgcctaggaattttggtctcatccaccactacatcgcccatggtgctgtactatagagagttggaagagccttgtaagccaaccgaggacatctaggtatcacttaatgttatcatcatccacacaagtagaatagttgctagtctctatcaagggcacctccaatgtgttgcactcatggtctacaactcacacaactatgtgcatgagacaatgcgtgtaagcttggcatcactaataacaattgggtgacaagcacctggcttagcaaaagggtgacaattcctcttggaggattcgacatcgtcaatgtatagttgtttaaaatgttggcacatgtatggaaatttgatggctcgcccatgtccttctagtggcagaaccatctcgacatctcatcacctagcatggcttagaggccacaccatgtgagctaaatacctaatcctctacagcgatagatcttatggtggttttgtgtggatactacaaaacgtttatctaggattacgactttgtttagctatccaagcttgtgaaggagttttttggaggaccaaaggcgagcgtacattccaagctcttaaattttttgttgatcactagcttgtcttgcagatcctaacatcaacacactttctgcagtcgattgtgacaccttgggtctagacttcagtcagattctccatcaagttgattccctccttgctttcttcaacagggcagacataccttaacacaaagttattgtcctaagagtgagagttgatccaacttattaaggttgtctttagtagtgaaacgctcacaactctgtaattccaatcgatatgagcaaggatggtccaatttttctgttagttgatgatacctataatttgggagagaagttgatgacccgactacaattgtactagacgttgtattgcaccttagcgatctatacacctctccatctgttgttgatcttacctggtcagatcaaccttatttctgcaagtaaatcgaagaaacaaggaagaacaagattaaagtaatttgataatacaaataggaattcaagctcacgataaatcgaacactcgataaggtgtggttccgaagacgagtaattaggcggtctggcagacacgtgcaactgcaaggcaaagtagcaatgactaactttaatataagaaaacctgagaaatactgaaggttacctagctatttaaggagatgggaggatgaccttggggtgtgtagggttgtgctccacatgattgaggggcactccacatgggccccacttggaccgaggtcctagtctccacacaaaattataagcataaaggctcatgacaggtggcacaacaccatctttctttaattgtggccaactttgatggaatatagagatgatgttaaatctgttggaaagaggactccaagagctttccaccaagtacttatgggcctgaaaaggagcccgtatgcacatttggtaactgtttgaatctagcattgttgtgtgacttgatctcgatgtctcctcgttgacctatgatgtgagaattgtcacacatcaagcaacaatgatgttttccatagttttcacctacctcttagcttgaagtacatctaggatcaatgcctctccacgatcccaccaaataattaggtaagctgttatgcttttagggtagagtataggcaggcctcgatgcaatattgtgatacaaggaacatgtaatattagagcacggtcgatggtctcctacggcaccgtggaaagttccatgtgccagtcgattgataatttcgctaacttgttggccgacaccatggtatgacgaggacacccaaaagaccttgcaccaactacagttgcacttttgcatgtgtccaccatgcacaggcagatccaagggtggtcccgggaccacctaaaaaaaatcctagcccaatgcatatatatacaaaaatgaatttttttgggggaaaaagaaaaaaagcacccttattaatgcattttgatgcacatttgatcaatttatactcctagcttcgttatatttagggttttttaaaaaaatatatattggttggaccacccatagaaaaacctagatacgccactgccagcatgcgacatttgttataggacttttgtataggcgaatatcatgtggcaaaacaataatatagaacacctccacccctttagtctcatgcaaccccttcaggagtcatctctaatgtaggtgcatatcccctttttgaggttctccgaaaggtgaatgttatgtatgccgtcctaccgtcaaggactggttcttgaagtgcgctcacatcattgcccttgaacgtcctaatatagctccgccccaagtgctttcttgtacaacatcatccaaactacacagtagcgattcatcgcccttgaccatcccaatatagcaagctccatcgcaagggccttgtccaatgcgatcgtccagctacagagtatcccgttatctattatgagcaaaagggatcccatcttcaccagtgccttttaagaggatctcttccagttggtatatgtcatgctacacatgagctttgccttttatccccaatcccattggcagatgtacctttactgcgtcgctgatgatcggcccacagtgagttcactgaatgccctgtgctaagattcgttgcaactcatttctagacagctaagcattccactccatttcgggtcatctatggtaaggacctgctagtccttcatgtctatgaagctggttttgcttgggttgtggccatcttcaatagcatgataagtttctggtggagattgcagcagctgtggtaggctcaaaccaccatggtgtttcaacacgatggccagcactgcgatgtcgatttcattgtcgatgagtttgtttggttcaacacacaacactggccagcctgctcttggctaccaatacatgggtgcaagtggtgcaaagttacaaattagtttgcggtttgcccgtgcactgtacggattttcgattgtacagatgaatttatcggtctttgttgtcttgttcttttggatggcagtttggtacgagttatctcattaagttctatcgttaactaaaatctgatgagttccattattcccgttcattaattgtatatgatgatgatgatgtattctgcttcacaggagatcacatcagcccttgtagcagatggtgtatcaccagataaaatcttgaccaactattagcaaggattggcgagcctcctgtaaagctcagtgcttcctttggcctcaagatgttcttttttctgttgtattttagctgttctcgtcctatagttttttatatttctcagcacatagatatgtatacattataatcattcttcagagtatggccaccttttcaggccatgtaagcattgagctccaggcttatttgcagttatgcggtcccttgcggaacttgcaaatagcagagtaacatttggcaactcttcggctcttgtattattggcaagagaacatggtggtgtttggttcaataatgttaacgtaaacgtaattgggaatgcttccgccggtaaccgattacgtgctttgtctggatagttgctgtaacggataccaattcattcgcgctgtttggttaggcagccaggtaacagactaacaggtgcaagcaaaacatgtgtcggttgagaaatcaaattctgaaactgatacacaacgagaaaatacataatatggagacttctgtttggatgcaaatgcagtgaacaagcacaacactgtcacttctatttggatgcaaattttgacagcaagaattcaagacaagagataatattttgcaaaatataatcaatggcacaccttcaaaattcaatcgataaaggattggatgaacaattgacatgagtgaaactaccagattagttaacaaataagctagggtagtacttttgtcttaaaaataggacagtactttgatcacagaatatgtacaaggaattggtagaaaagctttgttttcttgaaccacttttttataggtgcaagcaagcaagaaaggcataggcacatactccagctaggagtagtttggagtgaattatgcctccttaggttaattcctatggcattgagctggacagctggacccatacatgcattataattgttcatggtttcagacaaatagtatataaggcaataaaaggtatttgatgcgaatttgttcacagtgaatgcatatatgaaatgctaaagtagtaaaatgcaatatgcttacaattaatgacctcaaaataaagtatgtaatacaacatgcaaatgtgtatagggaattaccagcaagtattttcaggacgtactccctcctgagagattctggaagagcaagaagcatactcatttgagccggcacttttacaaaagcagctgcatcattgacaacttcagtaccagtcaatccaagcttttgacactcaagaatagcttcattctgaattttttgtagtgggtcctcctcaaccattgccttctcttggatctcagcttcatgttgcatagatgccaccattgctcccacatgctttgtaacatccctcagatcaccttgaacattggcaaagacatccataaaagggtcacttgacaaggtatgtttcagtttgttgctgtctttcttccgcttcttagagcttgaagcagttgaatcgatgctccgccgaggtgcagctgaatcgatgatccgccgaggtgcagctgaatcgatgctccgtcgaggtgctgatgaatcaacgctccgtcgaggcgtttctctagacactctctcttcatcctcctcatcctcttcatcttgaatatctcgaacaatttctttctccatattagcaacagcctcaccaaaaccctctgcaccttctccagtagcaatgtctttaccataaattgcagctagtgtatcatagtgagggaatgctacaccatacagaccctttgcctcattgtttttctgtaaaatacaaagaatgacacaaaattaaggtcatggtttagcaagcagaagagagacctatgcagctactgtgacatatcaaaaatgcaacaattacatgaaaaacacaagagaacatatttatgagagagcatactacaagaaaaccataatgttgtcttcgcaaacatttcaaaggaattttacatagcctcttatttggaacaaaatttcagaaaatatcttacagttagtttcacatatttcaattcaatgcactaatgaatcaataaataaattttgtattccatataattatatagttagtttgatgacttaccctgcaatgatcatcgtattgttgtttctcacattgtatcatctttctgttgtcatcccaagaaaagccacttttggttagcatcacttcaattgccccaaacttggtcctaaagtgtcttactctcgactcgatgtgcggaacagcagtaaggccagaatttggcaacttcttagcaagcacgttctctagaacttggcagtatccatttttgaaacccccttctgatttccagcttggatctaaagcaatctcgaacagtgccttgatcagttcctcatcctcgaagtacgtccaaatcctcttgttattgcctctcccacgcacaatgcttgagcttccaagatgctccataactgcaatattagaaattcaacagaaaactaacatcagtgagcgtccatagttgtaccaacatttgtttttagttctgatttgcaatcaattagaaattccatttaaaacacaaacctcaatgagccctatagctattatacatcccttgagcaagagtgttgcgaaaattcgtccaatcatcagatgtcgaaatagctgagataaactcaggttcagcgagttctcccttaagtatatccgacagtatctcatcctcatcctcaaatggatcactagacatcttttgcaaaattaagttgtgcaataaagcacatgccattataattcaacactgagttttgataggaaaataggatggagacctcaaaatcgctcaacgaccctttagtcttccaaaagacctctctataatatttctagcacttgtgtgcctcatgttaaagtactcctctgcactacatggtcggtcaagtgctgtgaaacgacctaaatgatatctttggcctccgtaaggggctaaaaaaccatttgcatttatataaccagcatcaacaaagtaatagcaacctttaaaagtgatctctctttgttagttcatagattgaatgtaatagagagacatctgctcttgggttggttgaacttgttgtaaatatttctttatattttaattaattttactatgggggcttcccctacagtgtttccctaaaaaaatagcaacctttaaaattaaaaaaaaagaaatatcagtataattcaggctgtggagtgtcacacttcaaaataaatttattggaaaaaaaactcgccttgagggacacgaagcccatccgacctgtgaattgcatcatgaaggacacagccatcatgttcagaaccctcccaactgggtagtaagtaaatgaactgcatatcgggtgcacaaacacctaatacatttgcaacaatgtctccttttcttgacctatatcttccttttatcctggttgggacagttacttttatgtgtgtaccatccaatgcacctaggcaattctacaatctagaacaccacatcaataaaatatggtacaattaatagtggtgagatgtgattttttttgaaaggaaatgtgatttattttttagaatgggttgcattgaaatacttccatctatcgtcggtggtgtcctcaggtataggttctggcttcttaaggccttgtttagtttccaattttttttcccaaacacgtcacatcgaatctttggacatatgcatggagcattaaatatagataaaatgaaaaactaattgcatagtttgcatgaaaatcgcgagacaaatcttttgagcctaattagtccattattagccattagtgccacaataatttacatgtgctaatgatggattaattaggcttaataaatttgtctcgcggtttccaggcgagttatgaaattagttttttcattcgtgtccgaaaaccccttccaatattcggtcaaacgtccgatatgacatccaaaaattttcttttagcgaactaaacaaggcctaagtagaagttgatgaagcttcagaacagctagcagtcataaattgaaatgcctacttacagtctctccatttcggtaaaaaaaactttcctattgttctattctttaaatggtgagatagtatatataagaatgaagctaccgatccctccgacgtctctaagcatgtcacatagaatgtgaaatgtcctcctgtccattcggagctcgcttatacaagcaatatcactctcacgaataagctggaatagtctttcactcctaagttctctaattttgatcctcctctctattttccaacattttctcttatatgaaatcaaaaacagtacagcaacataatattacataaatatgacagcaatcatcatatttctaagccctaaatttcggctcttgtattattggcaagagaacatgactaacctcattgagcgacttcaacagggtaatagccattgccagttaccgatataaaaatacaactatcggatcattcttagttgtattagagcgaatacagtaagacgatgtaagcggaccattaatatcgcattagatttgtgctcagctagcaaagggaggagagttgagtatagatttgtctccctacctcagatggcatggtaaaacagtgaaattgtagcccaacttaacacgagccctaacaagttgtgggagagtggtgtgctagatattaatagtgtggcatctataccttacaatttatgtttatattactagaacagatgatatgtcaacttttgtagctacacgataaatatgtacttagattggcaggattttcacgaggaaatgtgatgtggacaagggttcccgatttttcgaaaggttcggataatcaacgatttggtggagtcatgacacaaatcgatccggcttcttgaacgagcacgttcttgagccccgcaatcgcagcaccacgtctcctctggttatcaacagtgccgaaacccggttgacctcgccgagaaggctaatccctgcttatgaattgaagaacaaaaacaagaacaagaaagaatacaaccaaaattgcagatgaatgattaagctcacaagttggggtcttacaaaccgatctagcggcgaaactattcttgatagattaatctaaaaggtgaattaggaatttatctggtaggagatgatagtcttttcccctggagatggaaaattcgtccacccggttttattaatttgcaaattcttcctcagctagtaaaaaaaatgaaattggctgatatcatgacgatattaggtagtatagatatcattatgggagaagttgatcgttgaaatgataatagacagggtacatgtagaagctatcaattctttttcgaacttggaattattaaaagaagtctatggactgatatggattctacccattttgaccctcttactgggaatcacaatagaatagtactcgtaattgtgtggttagaaagagaaatatccgcatcgatacaacaacgtattggtcctgaatatgctggccccctgggactgcttcaagctatagcagatggaactaagctactttttaaagaggatatcttgccatcccgaggggatattcccttatttagcattggaccgtctatagcagtcatatcaattttattaagttttttagttattcctttgggatatcgctttgttttagcggatcttagtattggtgtttttttatggattgccatttcaagtattgctcctattggtcttcttatggcaggatatagctcaaataataaatattctttttcaggtggtctacgagctgccgctcaatctattagttatgaaatcccattaactttttgtgtactagcaatatctctacgtgcgattcgttaaaataggatgtttttcctctgaaattcattgaatatttatcctccttttcttattctatattcaggttagtaagttaaactagatagctatatgagtgaaacaaaactgcttattaatttgtagtaaaaagaaaaaatctcatttcctatgtacaagaaaaaatggaagtaaacataagcggtgtaaattctttaccccaaggttgagattttttgattagtcatcatatcttgaagcgggcaataataagagattcctgatacagaaagttgtaatcataagggaatccatcaaaagttagtgagggattagaaacactaaagtacataaaggattagtaatgagggaatctaaagcattagatatttttcctcataaaaggaatcataataaggacttgaaattggtggaaatgagcaagtagtactttcttcggattccgatccagagtatgttcccattcacttgttaaggaaatggctatcaagaacgaattaaccctttattccttttttctttttaaatactcctcggggaaagaagaataggacaaaagatatggaatgcaataaaaaaaagatctttatttattctttccatcgtttatccatattcatacagaattcttcatgaactaatacccaactcttttcgtttattaattgttataacgagtgttttattccaagattaagttattgttgaacaaagaaaaagtaccattatattataaaggatgagatgaattccgaagcgttttttattattctagcagatagaattcctttggtctaatttaggacgttgaaatcgattttatcttagataattctaactacgcccaagaagataataacgaaatgaaacaatactttccttttttcctgatcatagaggagctgtatgaaactaaggtttcatgtacggttttggaatagcggtgggaactgggatgttatcgtcgactatgattatccaacagttcaagtacagttgatatagttgaagcacagtcaaaatatggtttttttgatggaatctttggcgtcagcctataggttttctgatttttctaatttcttctttggcggaatgtgaaagattaccctttgatttaccagaatcggaggaagaattagtagcaggttatcaaaccgaatattctgctatcaaatatggtttattttatcttgtttcttacctaaatttattagtttcctctttatttgtaacagttctctgcttaggcgggtggaatttgtctattccctatatatccttttttggatttttccaaatgaataaaatggttggaattttagaaatgacaatgagtatctttattacattaactaaagcttatttatttctcttcatttctatcacaataagatggactttacccaggatgagaatggattagttattaaatcttggatggaaatttcttttacctatttccctgggcaatctcttattaacaacttcttcccaacttgtttcactataaaataagataatacaataacagtaagaatattttcaacacaaaagttctctcaaacaagagaaagaaacatacctttttcatagatatttcgaatatgttccctatggtaactgggttcatgagttatggtcaacaaacaatacgcacagcaaggtacattggtcaaagtttcataattaccttatcccacacaaatcgtttacctataacgattcactacccctatgaaaaatcaattacatcggagcgtttctgggggcgaatccactttgaatttgataaatgtattgcttgtgaagtatgtgttcgcgtatgccctatagatctacctcttgtggattggagatttgaaaaggatattaaaaggaaacaattgcttaattatagtattgatttcggagtttgtatattttgtggtaattgtgttgagtactgtcctgtttatcaatgactgaagaacatgaactttctacttatgatcatcatgaattgaattacaatcaaattgctaaacccaaaccctagagatgacgacgggtattgatatatagagtttagggttgtgcaaacaacccttgatgcaaccctaatgggttccaacatgatacacggcccacaagcccaaatacgacgtcgtagcgccggaacagattctaaacgtcaaattgttcggtcaattcccgaaggagtgatgtccgcatcaaaatgagtggttcacatagcctcatggacaaggacaactgtgtttgtttcagtttttactacctcccttctataatggattaaaatcctttatattttgggacatatgtagactttgcttgtttggggagtatttgatttgtagctactaattactatttggctgatgagaatgtagctaggaaacttctctcaaactaccgataggtggaaaagggcgcgttatcaatgtgagatcgatccggaggaatcccctcgacataatggttcgggtatatattttacaacaattgtatgatttttggagtagtcgatgctacgagccctccaatcacaagcagggccacatgttcgtgtaatcacgtatccaaaatactcatggatttacggttacgccgcaatcagttctatcccagtatcctgttactagcaccattgcatcctcgtacgatccagcctcctttgtgataggtcactcgaacatggctgctgccctgattgcactccaatgcatcaggtccagttcatccctctcaccgtgtgatgctgcgtggcctgagtgagtatgggtttccacataaagaattctttgcaccaaattacaagttgttgagttccttgttcattgggatttagagcaaaaggagattttactaacttaattaaagtaggtctttgagcaaaatctcaactacggtgtttcttggcgcgcgcactcaatcaaaccttgtgaaacctgctttgcacaaggatgagcctaagtatacaatggtgactaacaaaattaatatcaaaagaaaaaaaatgatggtgactaacaaaattaatatcaaaagacaaacgatctgctaaactccttaatctcggccgaaatggatatatgatattttcctgcacgaggaagcgcacggcacaaccaacattttgctatcatttttccatatcgggaaatattatgcggggcatgagtggcgagcgagggggcgtgccacgtcagcgaaaagctagtcctacagtgcccgggttggtttttttgcgagaaagcccttcggtttgttcgtaattccgagtaggtccctgccgaacggtgcccctgaggcgatattgtgcgtaagggcccttctaaaatccggatattacatgcgcaggaggggacaaacgcgaaataggagcgttctgtaaaaatagaaagtcgagggtctttttcgaaaaagttccgcgcactaaccccagccctagccacctcccccgcctctcctcgactcctccctctcgtcctgcgccgtcactctccctctcacgccgccgttgccgccgcctccccctcgcgccgccgcgtccgccgccgcgttcacctccgccgcggcggccgcatccagctcccccgccgcggcggccgcctccttctcgctccggcgcggccgcgctcgctgctctctctccctcccatctcgcccttgttccgccgcgtccaccaccgttgcggcggccgcgttggcctccgccccggcggccccgtccagctccgccgccgccgcgtccacctccttctctctcctcgcttgcgctagctgctctctctccctcccatctcgcccttgcttgctgctggagctcgaggggaaccctatcctagcctagcagtgcgtgcgtgcgagcgagcgccgcgggggcgtcccgggggagggcgagggcgtgcgccgccgatccgatccgcttcgccgccctaagttccgaggccgttcgaggtaggtctccgtccgacttctacctcagcgccctctccgccgcatccagggactccgccgccgccgccaaccccgcctccgatcccagcctcttcgaatccgtaagcgcatctccctgcaaccccattggtcgttttccttggtgttcgaatcacgttttggcttgttgactcgtgtggctttgcggtgtcaaggtgacggcggtgtgcgagatgtggaggtcaagggaggcagggacgagatggtggcacggacattcccggtgatgagcaggttgccctcgttctttcgtttatcttccggacttatgagtaaacactaaacacaatgcgtttgtccagagggctggtagcactaaactaccatttcttttttagttgttgccatgttggcatattcatgtcatattatcctatttgtgatttctgacagcatcttgtggattcagggcaattatatttgattatatttaaatatggcgttgctattttccagttgatagtctgatattgtgcgcttgtatacccttctggaacttctggttttcggattcattggttacattttaagggctaatatgaactatattgtagacagtacaagtacaagtcaatgtatgaagcaagtatgcaccacattgtgtgaaatgtttattttattaggttttaataaaggtggtagttgaaatgggtcagcttatcgaagatattacattgaaaagtagagtgcgggcacgatactcctgaatatttatacagaagtaaaactatgctgccttcgtcgtagaatattgatgcgtagtaccataaatttgataagattaactacattttagatcagagcgagtaaaaatttatgcccattccgatttttatggaaattataggagttttatatgattccaacccattagaaaagaatattctatagatcactttgaaacataagattacatattattttctattttgaaacttctgatattaaatgacaattctacatagagattttggagtagattcatgaggttgtcatgcttggggaaatttttgtcagctacaacttttcctagaatttgaagttctcttaaataatttagtttttttattcagatttcaagaagttgtagttgttaaatcaataaaataaattaaaagtcagaggttaggaaaatcagattctcattagctagatttttgctaccctagatagtctaatttttttccctttgtcttccgcaatgggtgccctcgccaaccacaactgtaaattcacctcatacctgcattatctttgttgataggcactgattacttccaatcatgtgggtgcccatttagttgcaacaagtggcattgaggcacagttatatctgcagattatatagcttcagggtcagtacacagctcaaaatatctattttgggcgctctgcatgaggaatatgatcactaaaacatttgagctattcctatgtcatgttactgagcagttatcagatatttgacaagaaaaataagcagtgatatattgaatattgttaccaccttactttttatttttttgggttagtgatcaggtcgctgagggcaggtgcatacttaataaaatgatactgcattatgcaagatcatcagtgcatgtagtgcttcagtgtggtcacatgtacagcatagagttgccataacatgctagattatcctctgggaattctacagttaattatcttggtttcctcatcagcttgcttatttattttaattaactattagattagaatagttatgtaggtgtgaaaaaaatccttgtgattgcagatttgttttgcttaactatcttatcctccaatccttcttttgatttaggggatgcacttgttatctgaatgtattcaccaggaaattgatttattagaggtagattgttacatgatgactactatgaaagacggtatatatgctttactgttgttctgaatgtttccccttctatcattacagcaggatggtaaatgcaagaagccaaagggaagtataaggttgtactattgggcttttcatgcatcaagaggtgggtattcctgatcattaggtcactgaactacagatttgatagttaattctcccactgtttcatgttgaaaaccaccacttgagttgatttatggtggcccttattcctgttacatgcgagtttatataaatgaaactgtctaattcaatccttcgtatagtttactgtcctagacaaattaaatgtgttctgttcctttttgcatgtgattctctggctaattacctttattcagcccatatccttccaccatacagtaattcatggcctggattttctacagcttgtatggatttggttgttctatatagtgcagtgaaaatataaagtttatgccttgtaacatcatctatacagtcaatgtagtttacaatttaaaggctatggcacctttgcgtaagggttccactatttgtttggcacactgcttccagattaaagcaaatatctagataggtagatcaaagcctttgttgaaggcaagtgttcccgatggggagatttcaagaaacttgtgttacatgaagatcggcgggctctttctgaggcagtatatgttaggtgtatcctggagtcctttttactggagattatatgcacaaaattcatcataattcacttgcatactaaattcagtgcattgtgttgatgcctataagtatcacatacattaggcccaacagaatttagttgagtgcactgctaggttaccaagatgcatatgctgcaaaataggacacaataacagtttagcttttcttgagctagggaatttgtgttctacctatggtagagtctttgtttgagctatcaaagtaattgaagaacctctgttcgatccttgtcattgtgtgttgttcgggttaggtcctttcccatttatcttcttcgagccagcatctttgttgtcttttttgcttacctgtgcgctacaatttggtgtgcttttttgttctatatgctatagcatctagatcacgtttatattgcctgcaggttgtatggcggatcctatttgatcgattgttcccttgcctaactctgtcaaggataacaagaataatagcctcattaaggtattcatctctctctctctctctctctctcatattatattttttagacagtggatagaaatccggctatatatgctgtatatatgtatatatattttttcctctgtgtgtcttctgaaggggccaaaaaaatgtgccttgcagaaggaaggaagcaacagtgggaagggtgcagcaacatctaatgatctagaaagagaaggaaggaggacactagaccctaaggttagtgagtcaatcatccatccagccatacctttgatacatttgatgatctccctccgcagcacttcaacagcacacaaaagtgcataaaaaagtaattaggaggttgaacgatccctgtctgcaggaaataacctgcatattttatgactttttttttgagactgacagcttgattgtgtgaatatgtgtgtgtatatatatgcacattctgcagacactgaggaggcttgcacagaatagagaggcaccaaggaaaagtagccttagtaagaaggttagtcggtcaaccaagaaactcaacagcttattaattcaagctagcagaaaggaatctctcctgcatgtactgtgtgtgtgtgtttttgtatatatatgtgcttgcagaaacgtacaatactttacgaaaagtacaaacatatatcctaacaataatgttagtgtatatgacatgtacatgttgttcacgcaagtgctgtcatatgtgcttttgttatcaactttatttgttttgctacatgcatgcatggagtgctagctcgcgattaaatgtgctgaccgactttgtgatgcggttgtttttggctctttctttgggacttatgtgctgaaggacatagttatttttactggctttattgtgaatttgaccggcctaccaatgcaagaaacattatcacttttcatatgtgcatttccaatttctttatggtctcaggtgtgaattatatattatgatggtcctggctatttgaaacatgagtcttatcttatgatggtactggctatttgaaacatgggtcttatgtattatgcggtgagtcttatattattagggtgctggctatttgaaacatgaattatatattatttcatttcatatgtttgttttatggacacatacgagcacaagttgataagttctgctaaaatttaatgtggctttatatactatttgtattgatgagtatatatatacactgctttattgttcaggcttacattcaacagttgaagtcaagtaggattaggctaagccagcttgcacagcaagttcacgtggcaagagtacaggtaaaaagctagccttgaaaatgtctgattattagcatattaattatatctcccagcattcttttgtatatacattactctctgctatcctatttgatcaacggaggtatatacattactctctgttattttgtgtgttaatcaattgttcatccattatgtttattttgttggctatgtgttgttttaatattcgttgcattgttactctctttgcgtttagtcgctctatggaggggggtcatgtgattgcacctcttcgtcgacgggaccgccgattgctagaacgccatagtgcttctcttagatgtatgctttatcatcatttgttcctttgtagctggtttgtgatctgccacagcttgttgtgtgtcatcgttaaattgtttgtttcctgtttagcgtgctctcctgtttcggctggtggtgaatatgcctgggaaacagttgctacgcagcgtaaaagtatgtgcgttgtttgttcctattgtgctgctgttgtgccccatcgctgctcacccctctgtttgtttatgtgatttccccccctccactagatgatgggtttttccctatttatcctgcttggtactcttcgaagagacgacagatacgatcaaaaaaattggctctcaaacgactggtggctgcaggtctttatgcttggtattttttttacttcccttcatatgtccctgtcagcctctcttatttgcaggttgtctgttgatttttcctgtaggtaaaaggctttctcgtatatcgtccctgtcttccaataggtttgatagtgattacggcaaatttttaaaaagttatttccactttattttacccctttccatgccttagtttatcgtgcaccgacattatatctaaatatagatatgtttttgacctgcatgtgcatatagagacgtcgaaggatataactcagtgccgcatgtgtggtgctcagttctggtaccaagaacgatgcaagagagattcagctataactcagcgccgtatgtcttatagtctttgttgcaaaggcggcaaaatttttgttcctccatttgcacaaccaccagaacctttaaattcgcttttgaagttcgatggggatgctcgaagcaggcattgtttgcagcacataaggcagtacaattcgctgtttgctttcacttcaatgggtgcaaatattgacgatagcttaaatcgcggtggcggtccttatgtctttaaaataaatggtcaagtacatcatcgtataggctcacttttacctagcgaagaaaccccactaaagtttgctcaactatatatttattatgacactcaaaacgagatcgagaataggatgcgtgctcttcttaatgaagaagtcgaagactgtgatttagatcctcagattgctgctgaattgctagatatgctggacaattgtaatcctttggttaagcaattcaggattgctagagatcgtttagctgataatggtgatgagcagttcgcaattagaatagtcggttcagatgagaatgggcctgttcagtacgaattgccaacagccgatgaacttgctgggttaattgtaggtgatttttcgttggagaatgcaaagcgcgatataattgtccaaagcattcctggcccactccatgtttctagcttacatcctgcttatatggccttgcagtatccacttctgtttccttatggtgagcgtggctttcagcttggttataaatttaagaggggtagacttgaatcgtaccgatatacgaacaaaggcttctatgcaagagcattactgttactgctgccattatcgtcgagatcaatttaatccttatttatgttgcggtcgtttatcctctcaaggccaagtagatggttatgcttgtgttgaagagggtagattaacattcatagctgaccagcaacgtgaacttagatgcgaacacatgcaaggaattacagatgcagttgctaagggttccttagatggtgcgagcgtaggtaagcaacgaatacttcctgcaagcttcactggtggtaggcgatacatgtaccagaattatcaggatgtagtggctatttgccgtgcctatggcgcacctgatatttttacaacttttacctgcaatccaaagtggcaagaaattgaagatgcgttgcagttcgaaccaggccagggtttttaaaatgaaacttgatgaaatggtttctgacattatgtctggtgttccctttgggcgtgtgcgtgctggttagttcccttttttgctatttctttggtttgcattttttgttgtgttattaattttgttcggttggttttcctaccatatggtgtagtgctttacagcgtggagtttcagaagagaggcctcccgcacgtccatatactggtgtggcgtgatgcgccaagcaccgatgcaacaccatctatcgtcgacacatacatcagtgctgaactccctgatcctaacgaaaacgaacttgattatttgttggtcaaagaatttatgatgcatggcccatgcggtgatagcaatagaaaatgcccttgcatgagaaatggatcctgttctaaaaaatacccaaaggattttaactctgaaacaacagtagatgacaagggatttgttgtttataggcggcgtgacaatggttcgcatgtgcttaaaaatggtatcaagcttgataatcgttcggtcgtgccatacaatgtgtcattgctgcgtaaatttgaggctcatataaatgttgaatggtgcaacaaatcaaagatgatcaagtatctatttaagtatgtaacaaaaggacccgatcatgccaatataaaattttctaggatcaaaaaaagaaagctgagtcgttgcgattgatgatactggttcatcaggttctagaaaaaagatgcgtggttctgattttactgtgccagcaccgatagatgaaatagctgacttcattgagtgtcgatatttatgtgccaaccaatgtatttggagattgtttgagtatgttattcactttaggaaccctcctgttgagcgtttagcatgccatttaccaaacatgaacacggttagctttagatcagacgcaaacctggcatcggtggtttcaaatgcattcttacaaaaaaaacaacattaactgaatggtttgttgctaatgatttgttcccaaaaggacgtgacttaacatactgcgagtatcctactcgatttacttgggaagaaaattcaaggagctggaaagaaagccggcatggttataaaatcggtcgaatgtactatgtccatccttctgcaggtgaagggtatttcatgagaatgctgcttatgtatgtgagaggcgctaggagctatgcagatattagaacatacaatgatgtcgtatacgatacatttaaggaggcttgtgctgctagagggttgcttggtgatgacagagagtggtcatttgcatttgatgaggctgtgagctgggggaccgggccgcaactcagatcgctctttgtgctcatggttgttcattgtggtattgctgatggagctgcatttttcaataaacattggcatgcgatgtctgatgatattctctttgatttgcaacaaagcttaaataatgctgcatattctgtccctgataatgaacttagaaatatggttctgcaagaattacacatgcttttcttcgcaatggtgttgctatgtcatcttttaatttacctactgtgaattgcgatggttcctttggatcagcaaatagattgatcgatgatgaaatgtcttatgatatagatgatttgtgtgctaatgctccgttattatgtagcaagcttaatactgaccagcgaaatgcatatgaacgcattgtgcagagtgtcatgacaaaatcacctgctttctactttgtgtctggctttggtggtactgggaaaacatttctctggaattgtattgttacctaccttaggtctgaaaaaaagcttgttcttgctgttgcatcatctggagttgcctctttgcttttgccgggtggtaggactgctcattcacgattcaaaatcccgatagaaattgatgaaacaacaatttgccatataaagcgtggtacaatgttagcagaccttattaaatccacttctcttattatatgggatgaggctctaatgacgcaccggcgatgttttgaggctttagatagaacattgcgtgatattctttctgaagatgatcattcagctgcatcaattccttttggtggtatggtagttgtgctgggtggggattttcgccagatcttgcctgttgttgaaggaggcgttagatcgaaaacaattgatgctacaatatcaaaatctcctctttggtcatatgtatgtgttttagagctatcgatcaacatgcgtttacgttgttcctctctagattctgatatgcaacgcgaagtcgctgaattcagtgattggatcctttctatcggtgatggcacagcagcagcgtgtagttacggcagcgatgttgaaccaacttggattgaaatccctcatgatcttttggtcatgaataatgatgaaaagattggagctattgtagctgcagtttacaccaactttgctgaacagtacaatgatccagtatatctgcaagaccgtgctattgtttctcctacgaatgatgtgtgtgctgctattaactcttgggttttacaactttttcctggtgaagcaagagagtacttgagctttgatcgtcttgcaaaaacaaatgaaaagtctgatgatttagatgttttatacccaattgaatttttgaatagcatcaaagttaacaattatcctgaacatcaattgtgcctaaaaataggtgttcccataatgcttttgagaaatttagatcagaccgctgggctttgcaatgggacaaggatgattgttacaaacttgggtgatagggtgatcgaagcgcgtattataactggttctaatgcgggggaaactgtttatatcccaagaataaccttatctgcgaccagcaaaaaatggcccttcacattagaacgtcggcagttccctgtccgtgtctgctacgctatgactataaataaaagtcaaggacaaaggttacgttcagttggtatttacttgaaaaaccctgttttttgtcatggccagttatacgttgctctttcccgagtcacttctcgcgcaggcttaaaggtgttaattgaagatgacaatggcaattgcactactcgcacttggaacatcgtgtaccgcgagatattttctgctgttagatagtaataatatatgtttttgcctatactatagctgttctgtacagatatcattgtcctgttcacatttttggagtcgtacagctgttttaaaattagcaacccttagttagctatactgtgattcctctcctgtcttgtgttgcagtgctcccataggtaattcatcgcatttacttccttgtttaatactttcccgttttatgtacatcgaattgtttcttcctgttttttcagatgccttttgatctgttctgtgatatatctcccacgagtaagaattggaagatctgtgcaacaatagcaaggaatgaatcttgtcaggttggaacgaggatcagacaatattcctcgagagattgcgagtgttgtgtcccaaaaattcactttctgcgtttctgtcaccgaaaggagcttgatgcagaggaacatcgcgtttcaagtcaatagcattgaaacttctttggcagacaaggcactattccacaggttagggatcagacattgcaactcacatcatctgtcatttcaccttttgctggtggttcaagtatatgtagagaaagtgagtgtcctgatcatacttcgacaccgcctgcttcttctaatacccctgtgggtgatatggagaaagcccatgctgatagcaggaaacgacgccccattatgcgccttgtatgttctgctcctaccttaggaaagacagaccatttgttttttttttgttattcggtcaaggttctgatttatacattattgtggcagcctctaggtgcatcgaagaagctaacttttgaggtgggcgcgtccgaaggaaaggatatagatacagctgttgtttcagaaaggtgattttgtatttctttgctgcattaatatatgtatgcagggcttatgtggtttatgtttttccgctatgcagtgcttccttacctgcacatgaaatatactatttatcgtcggctattgactaagcattgatagatataacaacttttgtgctgttattctcagggtgcagaattagcctccattgatgggaaaaaaaaggggtacagcattcttgatgccatgctttatagacttcttatctacgtattcttttcagtcacattaccgttagtgtgctttgctcaccgcatttattttttttatttcgtagcaccgtcaatcctgctggtgctcagaggacaagagcttcctatatgaaatagaagctacaatttcacgccatcggtcttcactggtctgtgctctcttgcatttccttagctatggtgttcaattgacagctttttattaaatatatgtaaccctacatctctctgtgtgttacaggcaatggacgcgtttgaatcaagtccttagttatgtgctctgctcttgttctgtgattcttgttcacgcgaaggtcagttttaaatatatttaagttcgaaagatttagctctaggtccatgattgaatggaactgattttaaattgagaatatgtgatggtatttcagtttagtttgggcagtccttggggcaaactgggagcctgtccaaaaaaaaaaataggaaatctttaggatggtcatctaattcagaacattaatgctagatgtttcagtaaccatgatatgtgggttagtaaatatgtgtgggttattaccgggtagtgcatttacccacattctgattcagagggacaaaatatattgccattgattatttattctgctgtgatgtaaaggaggatttaggttgcaattaataaaattgtactgctgcgtttgtacctaacaagtcacaactctttctggtaaacattttagcatgctgttttacatcttctagatttatttgtttttcagtgcaggtcactgactttacggtattggagttggagtagaagatcagctgctccatcatcgacgatggcctgatccacaaagatgaattttggtgctgatacttccagggaggtaaattattgttctatttcacacatgctggtggggtgcgatgtcatatgtgccaaatggacctgaaaatattgttagctagcctgagtaacaatttcgaatgtaggccgtgccttatacccttcagaatatataagcgctatgaagaaacaccattcgtgtgttcatataaatatgctatgcatagagatgatacgctaaaggataatcaaggattaatttcaatgctaaagtttgttttccagataaataacctcctaccttacagatcactgtagctcaaactacatgtccatgcaaactccaacattctttgcgcatggctcatgccctggttaaacctaaccatatcagcccttaaatcattggtaacctgccattccttcaaatacaaaccgaaagaaaataatacttcggcaacaaataaaaatggtattagccatatagcagcccttaaaacagagcctttttcaacaataagaagactgctgtataattttactcatcccctatttgacccattatacatcacaatatacaactcatgtttagtatctgaataaatccaccgaagaacaaagatcagtgctcattaccactacactataacaagcacctaacactctcctctgcaatctcagctctgttatctgtccctttgtttatcactgtgtacattgcaacttccctaccactgttaaatttgcacttataaatttcttttaactacctttttttttttgcagatacagccatgaatccacctaggtttttcacggttagactaaccacagcaaaccagcgctatgtggtaaccttaccaacagatataacatatacagtctagcttaatacacgccagtcttaatacatcatttcaattctgcagcgcagaccagctgcaatcgcacaaggatatcagctggaggatggccagagactcaaattagtaacaacccataacctaatggtctacattgaactaaagagagcatctggcaaaatatacatcactacaggatggccccagttcatagaagccactggtttgcagcttaaagaatatgtggttttcaaagtcttatcacgctccaagatgcatgtcatcatataagccaagagtggttatcttagatgtccagtgccaagcaaaccaagcaactcacagctaaagaaaaacgcgcttcagaaaccaaaaccaccaggtaaatgatcttcaacccactttccgtctcctatcaagacaacaaatcattttcatctatggcaccatatctgaaactattacattactgattccactctctacttttgatttccgttaatgcttgcaacgccaattcacctgcagaaaaaaagaaccaagactaagccacacatgcaacaccccatgcaacagaaattaaaagccgatatagggtcagcttgtacaggtacagatacttctctttctattttcagttccattgatttgcgtctcttttaatgtgcattgatgtattcattcactcctctttcgaaaggcaacaccaaacgcactatcaatgaaatgtgcttctgcaccggggagggacatcaatctatcaactgaactcaaagactacttcaaagatattgcgcaatttctgcacccctcaaacgaattctatgtcacaaccataaatccaactttcatgaagcaggataaggtggtaagataactgcaccactacccctttatatacctcttaccttaaaaactaacatatacttatcatgcagcacttttcaaagcaattctctatgacatacattgcactaatcgtgcggaagaagacatcgcagatcgaagtacggattccagggcactcctcaaccaccatggttcttcaccactccacagaaaagcgctttaacctgaaatcaggatggacccattttccaacaagcaacggcatacaagttggaacaatctgcatctttcacttccaccagactaatcagctgcaagcaacaatagatgtgctgtgagcaagatgctcatgcaacacaagctgttatccttttaatatcgtaggctatattttcactctgctacttctatagctgttagtatcattctttgtatgctttgcatgggtactcaatttccatgtaaaaatcacgcccaaactattatgccagcgtgctgttacagaacaggagctgacggtaccttacgtactgtctttggttgttttgcttgtacttatatgcaaccaaagacaattcaccctgtcctgtatgaacaaccatgctatcatattctgtttcacctttatctttatgtgtatgcagcaccctaaaaaattcttgcatagcgagcacactgtgtgaacaggcggcgcgcaaaggcgcgccccaatctctagtatattctaatggtttgtcctttgttcgttaacaatgtaaccttaacaaaattttagccatttattttttaaaaaaaatgtgcgattttattagaattggtttgaaattttttggcaatactactttttgttcctcctacaaactagatgaaaccgtcttattggtagtgtcaaattttttttgtatggttggattggaagatgaaccccaagccataaaaagaaaacccttaggcttagggtcctctgccgtattccaaattgtttctgagaagcacaattggacaatcacatactacctcactatctctatattttaatgtatgacactgttgactttttatccaacgtttgaccattcgtcttattcaaaaaatttatacaattatcatttattttattgtgacttgattcatcatcaaatgttctttaagcatgatataaatattttcatatttgaacgaaaattttgaataaaacaatggtccaacgttgatcgaaaagtcaacggcgttatacattaagatacggagggagtagcaactagattgtccacctctttataccataatagctagttgctcggttaccgttcaaaaagcataaagagttagacaattcagtgtgataccagattttctttgaccctatacaacttttggtagactcaaggaacggtaccaaagatggaggagttggggctataaataggtagtgttattgataaaccttgagatccatttgatacgatcacggttttgattggctcgatctttcagtgagttgagataactatgatttggaagagaagttgacggtcggactataaccgtacaggccattattgtgttgcaccttagcgatcgatatacctctccgtgggttgttgatcaaatcggtgcagatcaatcttatttttacaagtaaatcaaagaaataagcaagaacaagataaaagtaatctaaattgtgaaaaggaattaaatctcacaataagttggggttctaaagacgagtaattaggtggtctagccgacacatgtaactacaaggtaaagtagcaatggctaaaacattaatctaatgaaatctaaggaaccttgaagtggtacctagctatttaaagagatgggaggacgaccaagaggtccctaagaccgtgctccaccagattagggtgcaccccacatagaccctacttgggctggggttagttacaagtcgaggacccacatgtttggagaagaagaggaggcagacatgctagagtcgaggctagagctcaccaatggaactcaacatcgattttagtacttccagggccccacggggacccgcgggtggagatctcaacctgtccccatccccactgtaacgccctgaaaatcgccctaaatttaaatcgtgctttaatgtatttctagaaattttaaaagcctaaaagagcctccaacaattaaaactcaccaagatttatataaaattggcttgtggacatttttaataaattccccatgcttaaaaatatttaaccaatttttacttgaattttaaataattttagggcaacaaaaacaattaaagaattttataaaaaggaaaagctaaaagaaatcatcttcctcctgttgggctgcttccagcccatctctccctctcttggcccagcccggccacccctctcttctctcggaaaaagtacacccaaggtccctcaacttgtcgtcgggataaaaaaagtccttcaactacaaaactagatatacggggtcctttatctatacaaaaccggtcactagaatctttcggtggttttgactccggttttgatctacgtggtggctgagtcagcgtaggacccgcgtgagccccacatgtcaggtgtccacgtcaccctcactctttcccctcttcactcccttcctaatctctctctcacttctctgcaagctggccggggtgaggcgggagggcggcgccgcgacggccgccggcggagggggcgtgcgagcgctgcggcttctccgcctcctcgtcccgctcggccgacgtgggcgcgctcgtgtcgtcgcgcgcgccggcgaacgcgtcggcactggcagcggcgccggcgacgcgtacgcgcggtgggacgcggtggtggggtgccgggtgctcgcggagatgtaccggccgtggtctcctaacacggcggcgttgcagcacgtacgtggttggttggttcgttggcttcttctcggtttgttcgaggtcgcgagagggagaggaatcgatggagagagagaggcggcggcagaaaaggttggagaaggggaggcattggagaagtcaagaaacaagaacccaatcaccgttgagattgggttagttttccaccctcctctgcgccaatgcgtgtttcttggtattcttctctatattgttcgtttcttttttgtgtggatggaatcatggaaatggaaataaagatttgcatctttaccatctgcatgcgtggggcatttgttcgtttcttttttgtgtgcatggaatcatggaaatggaaataaagatttgcatctttaccatctgcatgcgtggggatccaggttgcagggtatcaggatatatagcatctggctagcgtcgattttctttttcttttgtgtgtcttgaaatgataagaatcgtagtactgatcatttctcccttcgtcggcaataataattcctctctttatcttggcgcaagaatctaatttgcagttgaagaacagacatggtttgagtagtaatatcctgtattatgaatctggctgcataacgcctcgtcactgcagcaatgccatcatcagccatggccgtcgacaccactgctcctgagtattggctgaactggaggttcatgctctgcgcggtctgggtctactcctgcatggtcctggcatgcttcttgatctggaagtacgagggaccgagctcgcaggatggcaatggcgatggcggcggggacagtgaggatgcgcggctgccctggtctgcatccggggtcttgtaccttgaagattgctggaagccatgccttgagcagatccaccctggcggccatctccatgtgcgacaccgctccagctcgcccctcgcccgccgcctccaccggcggccgtcgcggcgccgccctcccgcctcgccccggctagcttgtagagaagtgagagagagataaggaagggagagaagaggggaaagagagagggtgatgtggacacctgacatgtggggcccacgtgggtctcacatttactcagccaccacgtagactaaaaccggggtcaaaatcacaaaggatttggggtgatcggttttgtatagttaagggatcttgcatgtctgcttttgtggttcgagtacgattttatatcccgacgacaagttgagggaccttcggtgtactttttcctcctctctccccaccccctccctctccttgggccagcccagctcattccccctcccacagaccgaagtctgttttgccttctctgcgcgcccagtcagagacaggtgtgctccttctcgatgataggtgggtcccactcgtcatccctaacctccagccatcctctctctcttcgtccgaattccaagcgacggcaacctccgattcgcctcctccactcgccgtttcatcaaattaattgaggggaattaattcccacctcatcctctccaattcccccataatttcccactcgatccagcattattcgcggtggatttcgatgatgttctttaatggtgagctccaccatggccggcatcgatctccctccccggcgtctctctccctcccctccggcctataaaagggaccccgactccctcctctctccccacacaccgccgccctctccctcctctctccatagccgccgcgccgctctcttcttgtgccgccgccgttgcaactccggccgcccctcgctggtggttgggacctcgtcggagcccggagtcgccaccatccgcttcgccgcttcctcctcttccccgtccacccctccgtcgagcacgaagacggcgggaatgacaacgacccctccgtttcttcctcaccgccggcaacaccgtcaacctctcgctgccgcgtctgctcggtgagaaccgtcgtctcctcctctttccgtttttcccttcccgtgctctgtcgcaccgccgccacgccattggccgtcgccggcgagccgcctggctcggttgctgccgtgcctgtgcgtcggtgtgctcggctcacagtggaccgagcggctggcaagtgggacccgctcgtggacccagtccgcgtgcgctctctctcaataattcaagttttcctttagaaaaataattcacaaaattacaaatttccgtttaaacaacacctaaacttcaaatggccatatcttgaccgtttgaactcggtatcgatccgttcaaatctctaatttctccttaaaatgagtagaacccatttatgtgctttattgcttctgttcatatggattttattagcctttttgtatttcttcgcaatggtcgtgtagatcgtgccgttccggaagatcagctcttcatcgtcattgacattgaagactttgtgagcgatcaaggcaagtcatatctaccttaaacatgttgaatcccatattgtgaaaattatgttgttttacttatattgcattgctttataaattataccgttcattattaatattgttttattatttattcctatgctcttggttatggccattatgttgatttgatatccataatctttgtgaaccctagtaaaattataacttgactagtctagtaccctacatgatggactgactagttgctttaggtaaatgcatagtcctgcttagttccaacctagaacttttggataaactagactatggtggttaacaactaaaacttgattagttatggactattgactggtttgtcaatggatgggtgataaaatgctttgtgcaactaaaatatatttttgggctgggctcagggtgcaagctagttactttggtagtcgcaccccggctaatataaggaccggtctttgtgcaaccacaagtctagtgggtaaggcccgactgaaagtttagatcttctcaaaacaaagaccattggttggaagggtgtggggccaggattaatgccgtttcttttacccggcgcaaggggagcctgtctcgtccagggggatccggcaacctttaccttgtcggggaccggcgggcggtgaaacctcagcgggttctcctgttttgggtagacctagatggatagtcttgtcacgacctctatccgagtaccgtggtggtacccggcgcgtggcaacatgtgttgacgttgtgtcttctgggtaaagttgtacacctctgatgagaattaaaaactatttgaatagtcgcgccctcggttatatgcaagctgagcaatgtacccaaagttagttttgttttataaaaccttgggagggtgaaatcatgatggtgtagtcatgtggagattagcctgggctaaggcaggttcgcaggctcatgcgaccttggtgatattaaaatattggcttagaacaggatcgtgttttaaaatgagctttaacctgattaaaatgtttaaactatgactttaggcaaaataaatcctattaggccatttccatgttttccctatgcattattgttgcatttccggtgtgacttgctgagtatggtggtggtactcactcttgctcacaaaaataatccagaggatggacctgaagaagatgaaggcttggatctctaatttactccaccgtcgagtgcctgtggctgctgttgttccgtagtcttccgctgttttatttgtttatctttgagtgtgagggcctagagtcgcccatgtaataaagttcttcctttacgtttccgctagtgtggcttgtaataatcaacaatgtctatgtgtacctcgcctcctgggacgaggattaatgcactgagcgtttggcaatggtgtatatttccgggcgtgacaagttggtatcagagccaccttgaccgtaggacgagccagtggtctaagccttaggatgatattttttttagaaactagttctttaattgtgaaaaccttcgttattctatcttcacctgtccactctttacaaaactggtcattgactcttatttcaaaatgttgtagatgcctgagttcgagactacccgctgcttcaacttggccggttttgtggagcaacttcgtgccttggccgctgaagtcggatactgtatcactatggagtaccgcgtggttctcaacttcgaagacgagggtgtacttgaaccactttggagtgccaaggtgatgatcatctccaaccggatgatgctagaaagttgctggttcacaggagaaggtgacagccgtgaatctgcctgccaagaagctgcattccatgccattggggccctttgccagagtcactccgaccagttgaagaccactctgttccactaccaccctgctcgcttgggtttcgcagaagatgctgacttccgcgatgcccgcaatgaaggggacaccaccattgtgcacatgtccaagatgatggccgcgatggacaagtaccgtatggtctactacaggatgacggagaggatgttcgaggcagtgcttcagaagaatcgtgacaaggagaatgagcttcgcgctctacgcaaggagctgaaggacttgaagagtgggatgcctggaaccgtcgtcaagaccctaccacctgttggatcaagcgcctgtcctcgccacggcatcagcaacgtggatgagccatttgtggaccgtagcccctctaggagtcgttctcaagagtagacgcgaagtcttagtgcgcgtatgtttttatcgtttatcttctgctggagtttgttgccttgtgtgctttttggtatggactatatcggcccgttgtgatatagctatacctttgtggtgcttaagcaacttgaactctatgtaaccaacatcacattaataaaatttaaataagttggtttaatagctcgtgttcttgtcctgatctctcccttcttcttttccctcttatcttggttactacagatggtgaacacaaggagtactgctgctaacaatgctcgtgctaggaattcagctcagaatcagaatcagaaccagaaccagaattaggaccaaggccacgcccctccaccaccaccgccgccacctccgccaatccatgatcaccccaacttagcacaagtgctcgccaaccaaaaccaattcatcgcagctttgctccaccaaatgcaaaacccgcaagcacccgctgctcaagctcacgtacacgctccaccgcagtcaaagctgtcggaattcctccgagtccgacctcctagtttttcaagcacaaccaaccctgtcgaagcaaatgactggttgcacgcggtcaataagaagttggacctcatccagtgtactgatgaggagaaagtcgctttcgccgctcaccaactgcatggacctgcttccgagtggtgggaccacttccaggccacccagccagttggacaagttattacttgggctcgtttctctactgcttttcgtagagctcacgtacctgttggagttgtagcacagaaaaagaaagaatttcgtgaactcaagcaagatggcaggaccgtaactgaatttttgcacgacttcaacatgttggctcgatatgctcctgaggacgttcgcaccaatgaagagtagcaggagaaatttcttgaagggttgaatgacgagttgttagtccagctcatctctggtgactgcgaagatttccaaatgctagtcgacaaggcgatccgccaggaggacaagcaccgaaagattgaaagcaagaagcgtaagttggccaatgctaggatgtttcaaggaccaagtcagaaaccacgttatgcgtttccccctcaagttggttcttcatcggtagcacagcgtgcaccccgtccacagatgaacaacaagctgcagaactcaggatggaacaacaatcagcgttctgcccctgcccaggttggatcgacacgcagagatagctctgggaagatacttgtgtgctacaacagctatgagcctggacacttcgccgacaagtgcccaaagccaaagcgtccgcaagctcctgcatctgcatgcaatgccaactagaacaacaatggcaactgcaacaacaacaacctggtgaggggacgtgtgaatcatgtctcggctgaggaggcacaggctgcgccagaagtcatacttggtacgttcctgattaattctgttcatgcatgtgtactttttaattcaggagctacgcattcctttatatcaagagattttgtggcaaaacaccaaataagggtagaagatcttagcaaacctatgatagtatcaaccccaggaagccaactacctgctaagctctttagcccattggtaaccattgagatccaaggagtcacttttctggctaatctcatccttctaagctctaagaatctggatgtcattcttggcatgaactggttgaccaagcacagtggtattatagattgtgccagctgatccacatctatgactaggggtactggccagcgagtcactttccatgccaagcctgtatttccttgtaagcaagttctgaaccacgtcagtatggatgaaatacccattgatgaggacataactagctcggatataaccatgactaccttatgtattaatcaaataaaggtgcttatgttctatattagatttacttgttatatatttcaacaaacgttgcgacacaatgagttttgtgtgtttttgtttgcagaggtacttgcttgggcgaaagaaaagagaccgagcgtaaggaatacatggatgattgaagaagttgattggggaccaaaccaagaccttctttaagtcttctttcatatcaccacgtcacttttggtccatagaagacaagagataaagttctacacgttttggattcggattcgggcctcctgacagcatcaacttcaaacggacctactcactgatctagaaggaatttcggggcccataagtacttcttggaaagcttatgaagtctactttcagatggttttggtcccacgtcaaaactcctaccgagttgccgggaatctgcaaaacaagccacgcacctcatccagtccgaatctgattttgagttttgggccttgtaattgtgtcgtgggcttaggccaaaggggtgtgctccctagggcaaccctaggacgtctctaatcacatttattcagtagccatcatcgtcttagattattctgttgagaacagtttcgccgctagatcggtttgtggaatctcaaattcgtgtgcttaatcattcatatgcaatttggttgcaatctatcttgttcttgcttgtgttcttcgattcgcatgtaaggattagccttctcggcgaggtcaaccgggtttcggcacggttgataaccagaggagacgtggtgctgcgattttggggctcagtagcgtgttcgttcagaagccggatcgagttgtgtcgcgactccgcccaaatcgactgtttgtcaatatctatcggaagatcgggacctacatccctcatcagttggtatcatagcgcggttgcccattaggtaatttatcttcccataatcagaaaattgccacataaaaatatttattctttacctagacaatttgagccgttgcattgttctattagattttgctttgttgaattctagattgcatcgtcatgttgagtgctggtttagttttagatttaatttttagttttgagtattgcatctgttcatcactttgggtctaggatttatcacgtgtgagttgtacgtcaattttaggtccagttttgcatcttgtcggttcttgccgggaccttgaaaaattgaatcgtttcgtcgtcgggtttccgtttttgtattttggagaaatttttatccaacggtttgggagttactcgatttctagagctcctgtaccactgtgcgcgcgcgtgaggggagtactgtgcgcctgaggggagggatcagatcagatctatctgtgactatctatatttttctctgtctagaattgttaagtagtggatttgagatatttttataaaaacggaacctacatgatgtgagcattccatttttaagatgatctaattttagttttgcattttacatttgagtccctgtaatattgatatttatattttgagtccatgttcgaggtcagtggtcggttcttgttgaataaaaagtaaaaaaataaataaagaaagaaaagggcggaaaggtgcaaagaaaaaaaagaaagaaaaagccgcacaaaaaaaagaaaaaaaaggcagaaaggtgcttaaaaaagccacaccaagaaagaaaaaccattcatccttggagtatgttttcagagtgcagagttgtgcattgattcatatctagtccttagtgttgtcgggtgcttgcttgagctagagttgagtctagactaggccagcacattgactaatactttgaactattattcaactttgcattttctgattagtacaattacgttcctttgctactatatattgtgcctcccaagctccatatatattcttctgaaactgatgaggaatgtaggtcccgatcttccgataggtattgacaaacagtcgatttgggcggagtcgcgatacaactcgatccggcttctgaacgaacacgctactgagccctggtatctttcaaagatagtatctttcctggtatctctgaaaatctcatcgattctatttttcgtcctttcaatactatctttgaaattttcctcgattccattcttcatcctttcaagattatcttcgaaaatttcaataaaactcatgggtaccaatttcattttccgaccattatgtctaaatgtgtatgtattagcaacaaaattatgcgatccattattatcatatacccatggttgaccaaacaacaaagaacatgcttgcatagggacaagatcaaaattggcagtatcatggtaatttctaatcgaaaagtttagcttcacaattctatttaccttaaacttaccacaagagttgaaccatttgatgtaatatggatgaggatgcggttgtgtaggcaactcaagtttctcaaccaaatctgaactcaccatgttattgcaactctcactatcgattatagtacgacatgctctatccttaaccataaactttgtttcaaataattcgtggtactgccattgctctgctttctccatttgagagcttagcacttgttacaccaaagtactgtcattacgtgcatcttgttggtatcgctgatttcgagtgccactcatacctgtcattgcaaacacaaaaaaaacaaacaatgaaggttatccctaataatctgctacgcggtgtagtggtgcccctcaacaactcagcccaatggagcatcttaccaagctcttacaagtgtcttaccagcaatgctaaggacggtccaaccggtggctggttcgtgacaccttgaaggacgtgatgtggcgattgcaaggatcaaagcggtgctgaccagaagtatatgaaccctagtgcatggtcctgttacaacttaatccggcttctgaacgaacacgctactgagccccgcaatcgcagcaccacgtccctctggttatcaaccgtgtcgaaacctggttgacctcgccgagaaggctaatccctgcatgtgaatcgaagaacacaagcaagaacaagatagattgcaagcaaattgcatatgaatgattaagcacacgaatttagggttccacaaaccgatctagcagcgaaactgttctcaacagaataatctaagcaaaacccgactctaaacgatgacggctattgaataaaagtgattggggacatcctagggttgccctagggcgcacacccctttgggctaagcccacgacacaattacaaggcccaaaactcaaaatcagattcggactggatgaggtgacgtcatctaaccgttactcacaatttgaactggaaactagacaggaagttccagacctagaagacaggaacttctagactacacttaggaaaatctttttcaccaaactggaacttccggacctagaagacaggaagttccggacttgcatttttggacagatggagtatttgtaaaaataactcctagggaaacttgacacttggttcacactaagagtacttgacatatctcagagcatcacctggagcccctcttaatagtacggtttttcctaaaaactcgattgcaataaataaactatcccatgcacttctcgagttccggtccgctttgattttatacttttgggggggtctccaagcatccatcttccacaccttgggctaatgcacctgaaagtaactcaatgaactcattagtcccttaaccacatttgtcattaatcaccaaaacccactagggggatcaatgcactttcaatggttatatccgagctagttatgtcctcatcacccatcgtgaaagagtatctagatgtttttccggaggaactaccaggcatgccgcccaagagggacatcgagtttcgaatgacttagtgcccgagacagcgccaatctccaagagaccgtaccacatggctgccaaagagctagctgaagttaaaaagcagttggaagaactcaaagaaaaaggccacatccgaccaagcacttcaccctggggagctccagttatcttcgtggaaaagaaggacaaaactaagagaatgtgtgtggattaccgtgcactcaacgaggtcaccatcaagaataaatatcctcttccgaggatagatgacctctttgatcaattgaaaggagcaaccgtgttctcgaagattgatcttcgatccggctaccatcagctaaggatccgagaggaagacatccctaaaacggcattcacgaccagatatgggttatatgaatgcaaggttatgtcgttcggactgacgaatgcaccagtcttctttatgaatctgatgaataaagtgttcatggaatatttagacaggtttgtcatggtcttcatcgatgacatcttgatctattccaagacagcagaagagcatgagcaacaccttcgcctagcgctagagaagcttagagaacatcaattgtatgcaagttcaataaatgtgaattttggctttcagaagtgaaatttcttggacacgtaatttcagctcaaggagtggcagtggatccaactaacgtcgaattagtgaccaattggaatcaacccaaatcagtgacccaagttcgcagtttccttggacttgcaggctattatcgcaggttcatcgaaaacttctcaagaataacaaggccaatgactcagctactaaagaaagaagtgaaattcatatagacctcgcagtgtgaagaggcatttcaattgctcaaaaagaagctagtatctgccccagtgctggtattgcgaaatatccacaaggatttccaggtgtattgtgatgcctctaaacaaggactagggtgtgtcttaatgcaagacggacaagtggtagcctatgcttcccgccaacttcatcctcatgagagtaactacccaacgcacgacttggaactagctgccgtggtgcatgctttaaagatctggcggcactatcttatcggtaaccgttgtgagatatatacgggccataaaagtttgaagtatatattcactcaaccagatctaaatctccgtcagagaagatggttagagctcattaaagactacgatgtgggaatccactatcatccggggaaagttaacgttgtggttgatgctttgagtcggaagagttactgcaatgctatcatctatgaacagtgtcctcctggattgtgctgagagcttgaggccttgaatttgggaatagttagttatggctaaatagtgaccttaggggcgaaacctctactcctttaccaaattcgagaagcccaaaaaggtgattatggtatccaagagatcaagaagaatatgatgaggggaaaagcaattgggttttctgaagatgaacatgggaccatctggtacggcggacgtgtttgtgttcccaatgatcctgagatcaagaagcttattctgcaagaggctcacgagagtcaatactcaatacaccccggcagtacaaagatgtatcaagacttgaaaatgaaatattagtgggtcagtatgaaacgtgaagtagcagagtttgtgacactctgtgatttatgtcaacgggttaaagcccaacaccaaaggccaaccggattgctacaaccactcaagatcccaaaatggaagtgggaagagattgggatggatttcatcaccggtcttccaaggacccaatctggatatgactctatttgggttgttatcgaccgcctaaccaaagttgcacatttcatagtagtcaaaaccacttatcctggtagtaagttggccgaattatactttgccaggatagtttgtcttcatggggtaccaaagagaatcgtttccgatcggggcagccaattcacttctaagttctggtagaaattgcaggaagaaatgggaactcgtttgaacttcagcactgcttatcaccctcaaacggacggccagacagagcgagttaatcagattcttgaggatatgctcagggcatgtgccctggactttggcaaaagttgggataagagtctcccatatgctgaattttcgtacaacaatagctaccaagccagtcttcaaatggcaccttttgaagctctctatggccgaaaatgtcgaactccactcctttgggaccagaccggagaacgtcaagtttttgggactgacattctaaaagaagcagaggagaaggtcaaggttatccaagcgaacctgaaagttgcccagtcccgacagaaaagctacgcagatacgcgtcgaagggagttagcctttgaagaaggagactttgtgtatctcagagttacaccgcttcatggagttcgtcgtttccacaccaagggaaagttggcaccatgttttgtgggaccttacaaagttcttggtagaagagggaaagttgcttatcaattggaactactggcatctctgggaggagttcatgaagtattccacgtgtcacaactcaagaaatgcctccgagtcccgatagagcaagcagatccagaacagattgagattcaggaagacctgacttatgtggagaagcctataaggatcttagaaacatctgaaagacatacccgaagccgagtgatccgtttttgtaaggttcaatggagcaattatttagaagaggaagcaacatgggaaagagaagacgaactgaagtccacccatcctcacctcatcggaagcgtcttcgaatctcgagaacaagattctctgtaaggggggtggacattgttgattctctgtaagatccggcaacctttaccttgtcagggaccagcgggcggtgaaacctcagcgggttctcatgttttgggtagacctagatggatagtcttgtcacgacctttatccgagtaccgtggtggtacccggcgcgtggcaacgcgtgttgaggttgtgtcttgtgggtaaagttgtacacctctgattagagttaaaaactattcgaatagccgcgccctcggttatgggcaagctgagtaatgtaccaaaagttagttttgttttataaaaccttgggagggtgaaatcatgatggtgtagtcatgtggagattagcctgggctaaggcaggttcgcaggctcatgcgaccttggtgattaaaatattggcttagaacaggatcgtgttttaaaatgagctttaacctgattaaaatgtttaaactatggttttatgcaaaataaaccctattaggccatttccttgatttccctatgcattattgttgcatttccggtgtgacttgctaagtacggtggtggtactcactcttgctcacaaaaataatccagaggatggacctgaagaagatgaaggcttggatctctagttcgctccgttgtcgagtgcttgtggctgctgctgttccgtagtcttctgctgttttatttgtttatctttgagtgtgagggcctagagtcgcccatgtaataaagtactccctccatctacttttgataggcatatttccaaatctaaaaaatttatttttgataggcatattttaatccaacaacctaccctcttaatgactttctcggatttaatacgtgactttccattcttccacataagattggctgcatgggcatcgagaaatgtaaatattaatgaattgcttgtttacgaggaataactagtagcatgtttaaatggataataagtagaattatttatccttggtctgtgtgtcaagatgaaatataactatcaaaagtagatagatggagtatttcctttacgtttctgcaagtgtggcttgtaataatcaaaaatgtctatgtgtacctcgcctcctgggacgaggattaatgcactgagcgtttggaaatggtgtatatttccgggcgtgacccccgcccatgtctaaagtcagggccccgcccgacagacccgtgggagaaaatctgcatccgtccacaccctcgttgtggcagccccctgcggggacccagatccaacggggaaattgccactcttaattgtaagaggagaaagagaatctcgtgagggtgtggtgtgtatttgggagaagattgcgaaggttgacaccttacctcaagaagagaaaaggtaaatagtggaaatcgagcttcgccttgtcgaacgaaagttgtgtgacattcgagcttggaccggtgggggtcgcttggagcatgagcttgctcttggtggttgctttaagagaccaatgcatgattggttgcagttggttaagagagacttggcctttcggggccctcaacggagacgtaggatcgactgacttgaactgcaatgtctcctatctctcattactctgcacttaccgctttcttgttgagctatttggtgatcatattgttgcatgcttatctcttgttgatgcctcttggtcttgctcatatctagtgtgcaaagtgctccatctccctacggttttcactctctttataaggccaaggttgtccactcttagttggattgtacgggtctatattgtgcataggcgaattcctatattctctgtgtttggttgcactgtctagttgtgattagattttctgacactgtgtattgttagattatccgcaatgatacctgattaaccggtcaatactaattttcgctgcaagtgtttgtaattgcaggaaacacctattcatctccatctaggcgagatctatgatcctcaaattatgctccctttcaatttggatagcaaatatcacttgtaaccatatcaagaagcgacaacacttcatatggccataggaggtgttgtctattgataagatgtcatttaacattttttaaggtgtggaggaaaagaaagaacagagatgatattgttatccgtcaactaacaaacggtacaataaacatcttaattccaatgataccacaatacaattgaccattaagtttgcttgtaaggaccatttatgccctagcatatgttttgtaatgaaataacactttttttaacaaatgccacataatatgaaggaagcaattttcatttaaagatattaacttttcctgggaacataaaataagtgaattatgtgtggtttttctaaattgcatcgtgggaatgatttaatccttaaatgtttcacaaaataatttatgtcgagtcaatatacacaaggatattttgtattttttttctaattttgtgagtcataaaatattttttttcatttcaatatttcatttgagctacatgtagaaacattctaaaacatgtttagggaaggttctaatagctacagtttctcctagaattgaaagctcccctaaaatatccacctttttgtagattctataaagttgtagttgcggaatcttgaaaatgaactagaagacagaaagtggttttcccagcttttctagattttcactagttggattccaaccagctcttctcgaaatctaaacctcctctaaatatgccccctcgactaattgaaaagtttcgagaacattcttttacaacctttaaaagtttgattttatgaatttcttataccattttagttgtacaagtgcataatggtctttcggccggcaaatacggtcgtcaatgataggcacattacaagaatgaaatgaaataaaaataagctaaacaacctagacctaagtgcacctattagaacctagacctaagataacaagagggggacctaaggactcagggcattgaaaactaacggatcaggggggcctaaggactccgggtagaagctagaagcgactaaattcactacgtctaacacgatcaacttctaacggatcaagaaaaactttttaatgatagccatttatcttaaagatattacttttattgtatgacggctccatgtgatgaagtgtcgacggcgatatatgggcccatccatttatttcgaagttttccatgtccgaatagcttcacccgtgagttgaacagcagcaccttatcccctgctttgaactccttgtgcttgatctgtctatcatgccatcttttggttctgtccatacagatcttggcattgtgataggccttgtccctccattcctccagctcagagagctgcatcttcctgtgatgtccgtctccctttaggtccatgttccaagtccggatagcctagtgcgttgtcgtaggcacttcggaccttccattatatttgagagatgaagtgaataatttaagtcatcaaacaagcataatgaaacatccgacgcctcgagagaggaatattggagacattgctgagcccttagcctgccagtcaacttcagcctgagatgtgcccatcaaaccactcgaaggtggtgaccagatgtgttacacattcaggagacttgacaaaaatggctaaagatctacaacctctcaaatattcctaactcatactcatgtgaatctagttcccaggatgtgcactagatccacactttcatcttaagcatgattatacatagcaaacacaactaagattaaagaaacttaagacttacaacaacttaataactacataggccgaccggccaaatagacatattagagaacagcggaagcttgactacccaatcacaagcacaccgactaggggtttaccccattaagttctcatcctagaagaagcaatcggaacccacatcactcaaaagactaaatctaaacctgcaaacaaaatgttatatcaacagcaagagtcagtacattaaacaagttaatgtactggcaagcacaagtcaatcctaccatactacatgtaaggcatatattcaaagaaaggcaatatgtacttcaatttcagcataaagcaagttttgtttcgcaattcttttgtaaaggagttgatgcttcaattaacaaaacaaattttaagtttcaatattaagttcatcataattccatcataatcaatctcttgttgtcatcctttgacaacaagtcataatatatcacctcacacacacaacttaacacatttatcaatttcaaaccaatgtcacatgatcacattttaaaacataaagtctatactcatgacacatcaccaaagcgctcatgaccgtgagcacggctaatcgattagtttaaagaactctgcaaagtttgtacagctttacccacatgatatgaacgctctagtttgttttgagtttgcaagactccaccacactcttcatgttgaatgtgatctagaggtcataacgtagcctttacactacttagagcctagccttgcactagcacgatacgtgttcctccatcctaggcatacttggaatatgcctagaaccgttaagtggcgggcccacgccttaaacttaacgccgtggtggcggacacaacgagaacccacccacgtggcacaataccgttgtattggacagacttagtcacctaaactaccacgtcggcgcaaataggaagttcctctgaatcatcgactaattcctcagaattatcgactaactcatacataccggcctaacagaatgcaaggctagtcctaaatagattaatcagcttaggccatcccatactagcacatgtggatgtacgaataactttaaatgggtgacacaagttcggtccttatggacttgggcaaacactcccccctatcggtatgcaactaacaccatatgcacaccacttgccgcccaagtataaaatcacattttacacattttaattcgcaaatacccatcatattcattttattccagcaaaggttcaagtatcaaaaccacattttaattatagatggaatgagcatttgcatatttctaagcatggctaagcaagtagttgcacatagagcatatataaacccatttgagcacaaagagtgtactctaaccatttctaggggttcaaacagcaagaggatcaattattcaaggtggggtatgcagcaaatatgtcacaactaccttaacccaattttaaataccgatatagtctaagttcacatgcaactttacaaacaaatattttcattcctcaaatcatgggattcaatgtgttcaaaggatgggaggagaaaacttgccttgatcagagaaatgttagcacctaatccactccttcaccgattatgcaatcctatatacctataggagtcatccccactagctaatttgctgctttgtgagtaaaccacgtcatctcttttagtcctaaccatccgatatcagatgtgcgctctccatgttgatctccgacttcaatagccagagttgatctattcaccttctgatcggctgttgagctacccatcatctccctctaggagcaagagcatttatcaccaggaacggtcaccaacaatgagtggtccattagttgcgattaattccatttatttccctctttcagttcctctaaaaaccacactccgtcgtaaactttcaggactctcgattcatccccaatgccagcagggtgatcatccgcactggacaccaatggagaagcgccagagcctattggttataccaaccaagcggggcggaagctggtggaatcactatggtccgatcctccctacaggtatgatgcactatgttcttgacctccgtaacctcatccagaaaccacgctaatattgctgctgctgctacaactactccagtaagaggagacgatgctactactgatcttactgttgccattgcagtataggagctgtatactactgttcaaacactacgcagcgtaggttctccctgctcttaagcatcatgggttaatctaattcattatccatttttatttttagtcctgatgataagtggttttctttgactaaaattgttttacagggctattgctttatttttaacactacgcgctactttattcacatccaatttgatgacagtgtcaagaaatccatttagttcccattcatccacatgacaatattgaaaattgagttaatttctgaactctactaggcgtcattcaagcgtattgaaaaactgaggtatgtataccaaaaaatttcagcatttctgcaataatttttagcttctgcattcgccctgtgttgtttactgcttggtcgctggattgttgcaactgccctgttcgtgctgatctggatatgggtttgcctctccttatactccagaatttgtgtttactccaattctttatagagttagtacagaatagtggttatcttttttgttattatctctatcagatttatgttacacaggatttaaacaagttaagtttacgagcctacagatatctgacgacgttgttacaaaagttatcatcatgcatatattttcacttatgcttataatcaggttaatatgggtattatatatgtcctgatacattccattcttttgattgctatttgatatactttttgcccaagttctgttatagaacctgtcataaatcaaaaaagatattaaaaggttttcgtaggctttaacttttataaaccggacgcacatgcatttacttattgtcagtgcaaatacacccttagaaatcttggatgatcccatggtgttttagggaggaaattttatccactcattcctctatcccatggatccagtcagtgcccgctcaaatttgttcattgtacatacattggcccattctttgcatgaattgacaaaatactatattgattgtgggatatatctttgcttgctatttctatggattatccttagttttccgcagcaatacgctgggtttcgtctagttatctagataaaggacacgttatgcaattaaacaccgaaagagctgaaaatctaaaatgctctaaaatgcatgatttatgcacagtgattaggtactggtctaaaatgaatttaggtgaaagaatttttattttatcttgttccattagggagttataaattttagaagttttatcggtttatagtagtatagtcttaggtagtgttataaaatacttttgtaaagtgatttttattatattagacttcacagggtgtagaggtgtgttttataagaataactcatttggtttcacaatttttggagttataatgattttcttatagattttacaagttacaacgtgttttaggcatatagtgtttcatatgttcatgactttttagttgtaggttcagaatatgctacaatatgctacagtatgtttaagttgagcaaaagaagtagtttggttaactaaaacatttttagttcacatgtttatggtctttactactatggttcatattttataaactagagatgctctaatctaaactaacaatatattatattaacctagaaattgttatatgaactaagttcttctaagttttagtggatgaggatggaactatggcttcactggtcaatcaagtttttatttaggtttaattagacctaaagtgtatatatacttatacatgtttatgtattacttaaacaacactgtgtttaaattcttatttcactagattaaggttttgatctatgttctctacaaaaggtgccaaattttattttactatgttgaagctaactatttgctggttctatagaaactttgttcatttcatttggactaaaaatgaattttctacaagttttacaaattaaaggctgctctatgttagtaaatccttatatgaatatttagagacttttactacacagtaagtatataatcttatttcataacatggaaatacatgtttttgtgatcctatagaacttaagtttactcaaatttaagctaaattgggttctacatgaatttctaaagtttagcttatataaactaatcattctagagataatagttttagaggcatttgatgcaaagtaagtaattacttttatttcacctaatcagagagtgcatgatgatgaatctgtagaatttgattttgtttcaaaatgagttgagatgaattttctatgtattttataagtttgtacatgttttatgtatgacctatcttagataaattttagagacattatttgtagttttgtacagtgagtgtcaagttttatatttctaaaatagagttcataactttaagaatctacagcaactggaatcatctcaaaatgagttacatttgattttatatggattttacaagtttgggtgttttcctgttaaacatttaatgttttagttatttttcctttgcattttcagatttttatacacatgggtccactgatcggtggctgaaccaatatacaaaaagatccctaggctttatatgaactgcatttaggtccgtgggtccacatgtaaatctctgaagttttatagtttgaaccctatttttttgatcatttacaggacaaagtcctcatcttcaacctccagcagcccgatggactgggagcttggccatggctttggcgagctcgtcggcgacgattggtggctcgattgggaatgaggtcaaaagataaaatgaagagaatgctctcacgattccattcctctagttttcgtggctaggagacatcggagtagcgccgatggtgagggtgagcggaaggtatacatgagctgttactgcatgttgcctaggggctttgattttgctagatgcatccatgcatgtgtttcctaagaggtcaggaggctcaccaagctgtaggaagaaatcgccgaagcttggatagcagcggcttcggttggaacggttcaacggcggtgctcctcctcgggtgaacggcgacggctcgaacgggacgacgagctgctaaaggaaggcatgcacgagggttgtgaggtcaaggagatggtgtatgcgcgagaaatcgaacaatggctcactgaggcagtggtaatcgacgatgactgcggaggcgagttcggatcggcgtcgaggaagaaaaggatgtgttctccgtgttcttgatgtttcttgaggcgtcttgaagaggtggtcgacgcgagattcttggcacaacggcttgcttcgggatggacgagaatggccggacgacaacgatgtcgaagcggcggcgctccggtgcgtgctctagggcatcgttggcgtggtcacattccggtggctgtgatgcacaaaatgggaggtggtcaacagagaagaggttcggcattgtgtgaagagatggaaacgcgaaagagatagatgtgaccttgactcaaacggagatggcgatggtcgtcacctccatggccagtggtgaggtcgctggtgacggagaggcagaggacctgctcccctcggcttcttcggctctgagtgatgagtgaggaatggcgactcagactggaggagaagagagcgagaaaaggaaagcccgaggtcgtcgacacgttgtggccacgcgtcggttcgctcgatctctccctctctgtgttcttggtcggctgagggtgaggcacagagaaagggcgagctggagaggctgccaagtgggcccaggacgaagtgctctaggtggaagagagaggtgtgggtaagattctaggtgaacacggttttagacgaatttttagattattttctttcccctaactttgtagattcataacttaatgtgtggaacaaattaattagtgttgatttttctggaggtaaatgattaacctagattccattttctttggtttcactcaaaaataatgggtagactgctcacagaaattaaacaaagatgggctattagaaaggtagattgaatttttaggaagcctaaacagaggaggaaaattctagaaaaattatatttaggcatgataaataatctagtatttgaataaattattttccatgttcacttatgtgcagttaaatgtactttttggatgaagtatggctttagccgattaaaatttaatttgatttcttttagttttctgctttgactgattaatttgtggtattaaacttagttattaacttgtaccaatattatagtgaattgcttatgctaaacatagtttacataaatttttccatgatttcatcttgcatagattattttaaagaattagaataacctttctttgtatatgtgttcctacttcataattgcacctaatattattataggaattacattaaacttcttttgggctgaaaaaatatatattagaatttaatatatattagaattcccgtagacaagttggtacggtgacataccgatgggtgtcttacaagcagtcctatatgcccaaagtgcatcaggtaacttgttcttccatgccttccccatctcgttgaccgtcttctacagaatattcttgatttgtttgttgctcgtttctgtctgtccacttgtttgggaatgataatggagtggcaatgatgtattgagccccaagctcttgcaaaaagctttagaaggtcttatcgatgaaatgagaccctccgtcacttatcaccatccgcggagttccaaaatgagggaaggtaatctcgtggaacatccagcgggcgtgcttggcgtcagcggccttgcatggtattgcctctacccacttggacacatagtcaacggccaccaggttatattcgcactcaaaggactttgggaaaggtcgcatgaagtcgatgcccaatacatcaaatagctcgacttgaaggttatatgttagtggcatcgcatcccgagcagtgatccctccatgcttctggcaccttgtgcatctccgaatgaattcctttgcatcatacattgttggccaaaagaatccactctgccagatctttgcgtgtgtcttgaatgctccatagtgatctccatatggggcaacatgacacttctcagtgatctttatgccttcggctactggaacgcatctccgtagtagaacgtctgaacagactctgtaaaggtaaggtaaatcccacaagtgcatgcggctctcgtagatcaccctcttcttattttctcctggtggtacatggcacgcgaccatgaagttgacgatggttgcataccacgggtcagagtctgtgactttcaacagcatgccgtcacgcagatagtcatttatcggtagctcctaatttttggagtagaagcatatttttttagtgagcaggtattttagtgcagcatggtcaatgtaaactattaccttagctcccactaaatatgacatgaacttatcaatggcaaacactacggctaggagctctttttaagttgtggcataattaagctgagctccagtcaaagttttactagcatatgcgatagctttgtgtttcctatccttagtttgcccaaggacagtacccactgcaaaatcactaggatcgcacatgatttcaaatggcggcgaccaatcagggggtcagatgattagtgctgagatgagtgattccttaaagattttaaatgattttagacactcatcatcaaagtcaaacggggcatctgttgacggtcgttatcgatcagtttcgaccatcaatattaccaaaataggggagaattagtgatgctagcaatacatatatttgttagaataataatattccactagtattaggtatactaaccttttgcagagaatgatcataaaatagaggagaatcgacatcaattcagacgataaatcaatcggacgatgtcgagaaccagacttgtgtgtgaataggccaagaacttagaattggtctgcggaggggagcaatagaggaggccaccagctgaaattgggctggattgggccatccccaggttcggctgaaccaatcctagcgccattggatccaggttttggcatggacgtccaggattgcatcccaatgacggttgaagggcacttcggacaattccccttccacaaccgtcataactacctctatataaggagctcactctcttcacttcaacacacctcaagcaagagatctctcatttctctcaagtttagtttagtagtatctagctggtggaatagaattagaataggaatcaggagtccagaagtcttcggaagagttcgggtatggctctagcagctttcctttcctcttttgtaagccttgtacttttattagaatactcttctatatacatttatggtattgaaatactttccgagtatataagtacctactttatattatgttcatgttatactgaatatacggctagcttatctgggagatgctttggtgcgggtatagtgtttgcttatgcaattactctatgtcatgacgatgatattagagtagtatctggtagtttagacgtggtgtctagattacgtgatatcattatttggggttatatattgcggtcgagaggtgggccgctgatggtgacagctcagtatgggtattcctccgcgcctatatataatcctaagttaatttcctagggagggtattcctccgtatttagccccggttgtatggtcatgacgggctgtcgtaaggaactcggcagtcagggtggcttctcgaagtaccaggagggcatcggatagagggtattagctagtatatcagttagctagaatgtatgtatactatgtatactagaaatataggaatagatttcctttctcttttctttccacttagcttagatgatatattatgaggatgagtagttaatgcttatgtgtcactctacccttggattatcttaacccatgcttagaatatgattgtcacaagtaatatataaattattagttgagttctctctacatgatctttccacgggataaaataaatacgatacccttggaatactctcgggtgaaatgctataatggtatatccgtgcgcttgcggatgaactctgtaaccataatataccataagtatttctgcgccattgctgggaattatatttctagtaatgtcgttaagaaataccaacaacatccttagctagcaaggcaattaggggtctagcaattttggagaaatcctttatgaaatgcctctagaatcccactgttggtaattcttacggtcgcagataaaatccgcaagcgcacagatataccgatgtagcacttccctacggagtattccaaagggtatcgaatccaagggaacgtgtgtggtcagattttcctccggttcatccaaggacaccaagcaaaggatagcctaggatatagatgatttactggtgagaaatagtgtctagtgaaagcttaagtttaatcctaacgcaatacttcaggcattgacaacctgttgttcccagatattgctctactacgtactcggacagggaggacttaagtgatctcgatggctgtcaccacctctacacctaccttaaacgtactgtgggatacgcagcaattactggataacaattacctaaacaccacgtctaagtaattaatatctactttagtgtttataactcaccaaagcaatcactatattttagttgattatagtgaacaataatcccgtatgctatttaggaactaaccaagagataattctcacaagataaatctaaattactcaggaagaatattatattgaaattagagtaataaacaaaataaaagaaatgagagaagattaccgacaactccggaattcattcgacttcttctactctactctcttcctattctagtatacaatatagtacgatagagcctcttataattcagctcaagcttgaaagtgtttgtgagagtgaataaagtgatgtctatttataggataggtatgacggttataggaaggggaattgtccgaactgccccgcaaccgtcatcagggggtgatctggagcgtccacgccaaaacctgggatcaacggcgatcaccagggttcgcccaaaccagggggttaggccgaacctgggctgggaccccttggcctggcctttggcctagctcctcttctggccctcctttatccatttctcgaagttttgggctgactctcgggtattttgatgaagtccacaatctatccttgtatggatacatattttctctcactttagtgtgattttcctcccaacttcggggttcatcacctacatacaaatatacaccaacacttgtggaatatgtgagattttaacacctatcactatgtttgatgctttattatcgggactttatatagatgttggcagtatagaatcggcatttaatatatgccaacacccacatatggggccggggatgaggctgttttttgccccatgggtgagtcgggtcagggctccgattgttactgggggcgggggtgggggcgggttgtgaaaattaacccacgggtgaccctatggggccccgaaagtgtatatcccattatatggcccaatcaaaataaaacccaataggcccaaattggtgaacatgtatacaactgtgaagaaatcccttgacatcaccgaccttatccactcgtgcagatcttctatcgagggactccggactactcggtgctccatgcgtccgcgtcgtcatatcccatcaacatctgcatcatcgcgtcccatccacctctgcaccgtcgccgacttcccatctcggcagcatcgcgcgcctgcgccgctgctggcgtggcctctctcccacggtatttttgtagtctctctcccacggcatgatgacgagagcaggtctcgcttccgctccacgctccagcttcttctccgtccaaagctcatcgacaacttctttccttccacaccatgttggccctctcccttacttgcggtcttttctctcttcgcacctcgctagcctctcccctcctcaacacgtcgccggtcatcaggctccctaccttcgggcccccgaccaagtttcgggggcccgacggggctacggacgagggcaactttggcttcgatttctgcttcggggccggggctgggtggaagagctagcgatcgggggtgggggcattcttgtccaacccgcccccaccctgccccgttgccaaccctgactaccagcgaagttttgctcttgaatcatggctataaagctaggactgatttcgtagccatccgaaatgattggttttgaagaacaggacagctcacaaagatcaacctgaggagcagaaaggttttaaattgtgggttgcttcatcaaggaaaggaataaaagaagaagaaataaaaaataaagatacgaggatgacctagactcagataaattagcaaccgttccccggcaacgacgctagagatgcttgttggtatttcttacgaccattgataaatccgcaagcgcacggaataccgatgtagcacttcaccttcgggtgaccccaaaaggatatcaaactcagggaacatgtgtaatctacttaaggctaagactatccaaggacaacaactattggtaggctagctaggctagagatgactttctatgtgttttagttatccaacctaagttaaaggtaaattcctatctggtctgccagcgtggttccgctatagctctatgatgtaccctaacgtggagggttactaggacgggattcatggttgtcaccacctgtcgtttacctctgacaaattcatgggatacacaacaaataaaggtaacttagacaccacatttaagttattaattactactctaatacttgcctaggaacttccttctttatccggagtcctagtactagagtacttagtatgaatactaaacaatgaacccataaatatggaaatctatcttacttagactaaatctctactgttacaaaaattggagatgttttgtcggtattttggtacgtcatccgtgtatgagtcggtttttaagttcgtttgcttttggaaatatatatctgtatttgagtcggtttttaagatcgttcacttttagcaatacagaaggaatcatataagaaatctgtttaaaaaaactcgcatactaacttgagacgatcggactcctaactgcagctcatgattttctaaaaatagatatatccaagcgaactcccacagtgaatttcatcttaaccaaaccatataacaataataagattaaaatagacttcactcgttgcaacgcacggacatattttctagtaattaaataacatcagaaatgatcccgaatgcttactttatagaagaagtttctccgaacccagagtagagtgtatcgacaactccggtactcctctagaattcctcttagaaagctacactagccgaggtagaagtcagagagagcgccaaccttccggtcactcctccaaagcttcccttcactctacctattttataacatacaaaagatacaatagagtctcttgtaattcagctcaaagttgtgggtgttggaatgaagtgagctcctccttttataggctccaaatgatggttacacctattgggatgaaatcaggagcgtacatgtggaagatggcgatcagcggcctccggatgtgttcggccaaacccaaaaaccctccctttggctgggaggtagcttaatggccccccaacatcatgtattatgatttggcccaattctaagtggttttattgacatatgggccctccaattcatgcaaacgcgtcctaattgtccgaagttgcattttgtcgcatgacaggtgtgttttctctttaaaatacctgtatacacatattttaatccacactagtggaaatgattagtaataaaccctaccactaagttgaataccatattttattctattatatgtaggaattgacggtcatatattatgatttaaggatcgtcaacaaccaactaacgttagctgatgataatggcaacagagaaatgagtatagatgggacagtggtaaaaggacattatgattataaagttttataaatccccatccttataaatttgcaaatgttcagcgcatatttacttaaaattttaaaatatggagtgtagaagaaattttttaatcgtggatttcttgattaaagttgttggttaaaatcttcattattttgaaaaactaatatgatcaataaatttcacggttcataaaatatcttaaaatgacttcttaaaaataagaatcatgtgctataaatctgggtggacctatttaaaaatatcgacatatttatatgaagagaaaatcccttgtataccctcaaattttacctaatcgcttctatacccctaaattttgcttacttccttgtatacccctaaaatttgattttgatcccttccatacccctcccgtcagttgaccgttagttgaccgtctattttccataaaaatgaccattttacccttggatgaacaaagaaattcatgagttacattattaaaaatataaaagcttctcgcatgagactattatagttatgagtttgttattcgatgcattatttatcccaaaaaatattgttagataatgaaataaaaatacatatttatttttttaaaaaaaagtcataaaaatgaggagcattcatataaaaatagaactaccaatgttcacaacattcttttaatgaatgctcccgataaaaaaaatccattgtactattaaaatttcaaataaaaattttaatttattacatttattttattttcaaaatttatgtcaaaattttttgcactaattatttagtctctttatatttataaaatgcacatactgtacactcaaacaaaatttttaattattttttaagcttatatttgaacccaaagcatcaagggcaaaaaggacatttgcaaccaaatgtaacagtgaaatgatggaaaatgtaacggtaggggcatggaagggatcaaattgaaatttcaggggtatagaagagatcgggtaaatttcagaggtatgaaagggattgagtgagtttttagggtacgtaggaaatttactcttatatgaaattccctttgggaacgggacgaatttttgatctgccgccatgccgctcaaaaaggtcgtttcgaaatacgcacatattatacttgtaataaaatttggactcctttcccctccctcccctccttccctctgcgcacccaacccaacccatccgcagctttctcccacctccgcgcagccggtcatacccccattccaggccgctagggttcaccgctgccgcccgcgacggccgccgcgcgccgggcacacagcgcgctttcgccttcacgggctcccgttgccgtctcgcgtcgtgcccgcccccgcgcggaggcggagctatccaaagttatcgcgtccccctcgcatagatctgatattcgcgactggacccgctcctctcggctcgcaatgctttttggagttttgtttctctcccatcccaccacctcggcctcactgagatctccgactccgattacgccagccgccccctaaacctagccgcagcgcatccacccccgcgcgagactagcagcggcgggagtgcgcggccatggcgacggatcgggagaaggagcgggaagcggagctggagagcgccatgtacaccaactgcctcctcctcggcctcgatctcgccgtcctcggttccccctcgtcccccgccgccggccctcgcgtcggcctcttccgccactccaatccccgcctcggtgaacagctcctctacttcctcctctcttcgctccgcgggcccgcgcagtccgccaaggcacgtgcactgatgccctcttcttcttcttttttgattttgtttctaggttttctgtaaatcgtatttgatttatttcgttggactctcaggactttgataaggtgtggccgatcttcgactccgcacaatccagagagtttaggaaggtaagattttgcagatctagtttgcttctcggataatttactacgtgcagaagcatattgatgctttgaccttgacatctgttggttgtttagatcgtgcaaggaatcatcagcgagctggagcagcagggagctctgccacggagcaactccagggtatcttcactcgccacctgctgtgggccgaggttagtaccaagcacacagctgcattttcttgggttgaaccaccttttagtactatttttgcagctttcagcagcaatgcagcttaattgtattctggaaacgtatgaaacgtttcatttcataattgaaattgtggagagttcgtatcaatcactggttgatttgcccttctttagaccgtgttctacatcttttgcgttgatctcaaccttttatagtttaaaccctcgagctccctgaggtacatggcttggagccatcagcaaatacatatcccctcttgctggcctgatgtgcttctcaaggagctaagtaaggcatcttgctgggtattgcctcatccatgcaattaggcacatcttttgattgtgctgaactttatgcagctaggagaggaacagccatgctaggcccctggccagcaaggatgacgggcagcatactgatttgggtagctgcttccagctaccagacacaagacagaagaaccatggggtcgctctagttgaccaaaggagtagagggcaggagcagtgtggtgacattggcgaggctggacacatgagctgtggtggaatagtgcagaaggagcatactgttgttacgagtcgtgagaagcttagtgtgttatctgtgctgcaacgccttgagtcggttgatcagtcctggtggtttggggtattgacctaggatattctacatttgaaatgggttgtttcggaccatggagagcattaaattgaaatgacacataggaggtaggacaacacatagcgcctatttactgccactgtaggaagaaaatttcccgccctcaccccctgaattcgagtaatggagaaggggcataccattgtcacaagaagataaatgtggcgtcactcctgcagttgcttgaatcgatggttggtcctggtggcatgaggtattgatctagggttatgctagaattgctgggtgggaacattttaggtgggtcagaatggagcatgtagagtgtagcagtaaagtcaaatgagacatttgagataggaaaccacatagcataggactgttggggattgtgtccacccattttttgctcctgtaggaatagattttccttgccctcaccccctagtacgggaattctatgtcttgtacctgggtagggggtgccattgccattcctaatatcaagtgtttcaggttgttatatccttagtgtttctttgtttcaccaaacaagggcagagatcatatttgatgtgtaatgcattttcgcaatcaacacatgaaattcaatagtagttagttaacattagtgaagctgatgtggcttcaaaaaataataatcttgatttaaccttggaaaattgggtgttttatcagaaaaaatgatagctaatggccgaaggctgtgttcttttggaggggttgggaacccctcccctccacacagaaaacggagcgatagattaacatgtgattaattaagaattagctataaaaaaatgaaaatggattaatataattttttaaagcaactttcctatataaactttttacaaaacgtgcaccatttagcggtttgaaacgcatgcacgcggaaaatgagggaggtgggttgggaacccatggggaagagcacaacctaatactatatggtagcattctctttgtctctttattagattctgttttgtgattccacattcgtagcattctctttgtctctttattagattctgttttgtgattccacattctaagtccagatctctgtaataatctgcaatgtacccgaaaagtgactgcagttctattcaatagtttttttttctgctccagtatatcatataaattggaacattttcatcatcgtcgatgtaatgctaccctatatcggtgcagatttgttgagctattgtggcaactctctgtgcatgccttgagagaagtccacaggagaacatttgctgctgatgttgcatcaagcccgctgcctgcagcactcacagacgtctcttatctacatgccgctgcattactccctgtgactaaggcaaggatggctgactcttcaattttctgaaaactggttggttgtttagtctgtcttaagatgaccctgccgcagatgttcatcagtcttaaaataggttattcgtagagaacataatttcatagaggatatacttggtttgaggctttttatccctgtgagcatacttgtatactcctgcaatgctcaagacatttgacacctagcatagattatttgtagagaacataactgagactgaggtgttattttgttaggtgttacattatgaaaacaaaataacaccttagtctcagtttattgatatgtgtgcaatagctgaagcaagattctattgcttcatttcttgagaatggtgatccagtaggccccatatcaagtccaattcttagttgctcttgatttttttttttttgaaatgggtgttcttgatgacttgtttacttgtctataaggaaggttgattatggttgatgtttgtatgctataaaacataatgttcatacagagaccatgaatacataagacaaatatggatttgagtaagaggcagcctaatagtgtgtgatgattgtaatatactgtggtaggcaatcaaatatttcttatgtccatagttggtaggataacttgtctgaatatgaggagcaccatttctattagtggggaacaaaatgtgtctgttgttcctccttgtagcagaaacttcccatgatacacgagcatatttctccttatacatttgtatagcaatccagatttagttatttgagatttttaaactgtaaattatgttctccttgtgctattccaaacaggcaaggatagctcttgagaggcgtaaatttctaaaaaatgcaaatattgctgttcaaaggcaaacaacctggtcaaatttagcccatgaaatgacagctgaattccgaagtctttgtgctgaagaggtacacagaaacttctgtgatgttcattcagatagttgtgttgcatcctgttcttattatcacttcatctggaattttcaggcctacctacagcaggagttagagaagctgcaagacatgcgaaacaaatccaaactggaaggggaactttgggatgaacgtatctcaagttcatctggacagaattcccatttggtgtctaaggcaactcgtttgtgggaaacaatattggctcgcaaaggtacgcttttattagaatatgcccctttgttgtctgatgaagttaattcaagcttaagattagtttgtgttagtaattgacacaatagtgtatagttccacatcatgtatgatgagttatcttgtacttgggttaagggacatgtagcatgaaagagttagatgcttcttctattcttttctctggcacaactaggtcattttacaatccaaacagtttggagagaatcaatgaactccttttctggagaaatccatacttcctgaatgcagcattccttctgcccttgaatattatttgtcattatgacattcccaaaaaaaccagtttcttttgagaaatcaactgaagcttggcttgtttatggtttggttttgtctgtggactattctggtgataaacctgagcaaatatgctaatagcaagccataccctggagatagcaccagtgctaccagggcacgtgtccaaaataattttcgcaggttgacacgcattggcttattgagtcacgtccaacagtgtgacacataccagtgtcgaagctgggggagggtcctttgctgtgctctttgttcaggatgtgttgaggctaaccattttaagcctatttgctttttatttctgaaggacatatagtattttaaattttaatgtgtttatgaatgcatgccaaactcatagtcttggttgtgtttctttatgcacgaggttcctctgcttctttgtgctttctctacctgttttatcagctccatgtttgtgcacttcacttctgcagcctgaggctttctgctgtccttattatactagcataatatgattaatgcttagttatctttatttgatgggagtatgtttagttcttactattttttatgataatataatttattttaggagaattctagaatcctatttttctatattttgccagatcaaacaccagattccgaatcagactctgactctcctatcgagtcctggtaaaactgagtccattttgcacttgaaaactgtttgttattaaaataaaatctataggtcttcattattatgccatccttggcaaacaatgttgtttctttacataacgttgagggccatggcggtacttttaatttcagatattaataggtgatacctttcaggccaacatgaggtcttagcttctggaccaattgaagatcttatagcacatcgtgagcataggtgtgttccactccaactttgttgtttatccgtatatctggttctatcattatctcatcatttttcacaaaatggattatattaggtaccgtatatcaggatctcaattgctagcagcaatggatttgagttcaagcgttccacattctgagttactatcagctcgagctagtgaagcgtctccatttttggacaaacaagaacagatgtctgctctattccaaggaaaggaagaagccctctcaaggttagatgataggaatggacgtgctcaacaacagactgttgatgtggctgaaattcttcgccgttggactcatgctttacagcgtattcataaacagtctcttcatttggtacgctattcttacattaattttgatgagtttaatggcattcttatgcatttaatttatttgaagttttgaacgcgtctgctttcatatagaaatatgtgcattcaacctttcacaactactgtcactgtgaaagtttgactttctgtctttcagctgtaaactacaaaacttgcagtctgatcaccctcaactggctatgatgtgcaaaccatcatccttgtccaaaataatcgttgtttcaatgatgcgaaacataccctagctcttctattcacatgcttcaactaattgacttcctagtcaattattcctcatcttatttcatcaaagttatcagatccttttttcatcctcaaaatcaatgtcttcctcatcttattcctccatttatgccttcagtgttaccattaggagatccaattctggcgctcccttcacctatccgatgctcatattgtcacactctcgaatgccaccaatctcaacctgcctcctttgcagccccttgtggccatcttgccatagttaccaatccacttctggttcttgatctagctacccctgattctgtttcctgtctcccctggtgtttcagcagcaatgacacttgtatgctggccatactaatctcatcattcgtagacatttaaaacttcagcattgataatttgaatccccttattagtggttgaagtattatagcatttccaaaacattaaatgaagtatttacttgcaggtggttaatatgactgttttgtaataggtgccattcaatgcttagcgttgatatgtgttaaaagtgaagttatacatcatttttatgtttcacaactgatactattgtagatggctaagtatgcataaaactataattccatatgattatcgaactgattttttccataaattgtggaaaattaaacaataggaatttctaattgttttcttttccgtcctttgctgtattttttcagttctgatatcactatttcaggaaatactagagcactttaaatcaaggatataaaataatcttctgcatcacccatatttgttggttgcattgcatatttggcgccatattggtatctaatgcatattaagtactggtatggtgagtttttagaggattctatgttgtctgctggcggttaggcaagctcctgggcaatgatggggtcctggacttggtcaatacagctcttgtctgaaacctaggcacaacagacttgtgcagtatttatgcataatatcttccgttagctaacatgtagctgtgtactaatttgacaggccaaagcaaatgatggagatggaccagaactactccgaagtgcatctgatggtgaaactagtacccatgctgactcattaacggcaacattggctgaacatcgtcagcacttagtcagtatacaggtaaaaccaactatggttggaagctaagcttgcaaaactagtgtccaaaatttttgtggtgtcgactcgtgtccgcttgtctgacgcggggagacacgcatctgaccctgctaggcgtgtccaaattccaaactaaaggaagggatttggtgggggaggggggggagcgagggagatggacaaatggtagtattttcttgctttgtggtggtttcttgggagcagcaaaaggagagagaagcatcaaggagagagagagctcagctgcacccctaccctttagcctagcacacagttggcctgttaggtagtactaaggacctgtttggtagagctctaagcctctaactcctaaatttaactatgggagttggatctggagtggagttgtggagcagcatatacccaactccacctttctagttcattttatgaatgcgctccacccagctccactcacattttagatggagctaaaactgtttggctgggctccagctccaagagaggtggaggtggaggtggagccgtgccaaacatgccctaaagtattaatgtgtgtctgtgaaagctctactcacgagagtagctggctaggattatctatgcataaaggatcctctgcttggctctgtgggtgtctccagagtctttatccctatttctgctttttattttatttattagtgtataatacatgtgagtccccgaatcctattttttagagtttaccgagtcggactcctgagtttgagtaggacactggctcctgtgtccgagtcccagtaacacagcaacacccttggggtttgaatcacgtggattttactgatgattacttttatctgtcaactgactgattctctaaccattttctagggcctaattaatcaactcaaggaagctatcccggcaatgcagcagtcaatagcagatctgtcagaggaagtaaatagcgtatctagtaatccaatggataaaatcatctccagattgtctccgtcagtgcaaaattcagggtttggaagagcagaagtaagaaaaagaaaaaaatattggattggttttttgttcgatgatgatataccatgttttgatcaatacagaaaatagtctcgttaaaaagaaaaatagtggggctatttggtttgtgaaatgtccatgctcgtttaatcagcttattgaggaatgtgtgtctgttttgatcagctgtccttgaatcattgggtccaagaggcatgcactttgtgtaatagggtgaattcatcctgcacaagctaataaactgtagcatgggtaagggtgtacagaaccagttgaacagggttggtaatctccataattcatgcatgagaagcagtccatgcatgcatacaagcccaataccaattattggcaaaatttgtttttatacacacctagctaattgtcatgttaatccaatccccattataatggacttcgcgtggcataggggtattcctcaaccaattggagtcttcttttctcttgtagttaccacaacagcttttggtgtaaagacattatatcaccatgttatggcgtgtcactttgagtctgtctatttattctcctgctttctaataactttttacaggaaagcagcagtgaactttcagagatgacttccaagctttcttctacacaccttgacaaggctgggagcagtcctgctctaaagctaccacctttatttagtctgactccaagttcttctggaaaaggaacacaggcacaaaaaaggaatgcgttaggacggcaacctagccaagaaatcctgtctgaagagaaaactcttccccttccctcaactaaagatgaaacaaatggctcaatacatggtattttctatattgtctaaaccatatgtttcttctgtaaattccttattgttccgttggttacaagctgaacttttgacaatgacattggctaatttttttttctatatctatttttgcagaaaatgagggttattttgctcataacatcagacgttctgttcgtgaagctgctctatcaaagccattaagaaacccagagaggccacatgaccagagtagtgatgatggttcagagcacttctttattcccctatcaacaggtgcttcaaagatggagattgatgccgtcgataataatagaagaatgcaaaaactgggtttttcatcaccacaaatgaagttcagtgatcttcacttcaatgttgacagcccaatgcatgcaactcctgttctgtcaagtaaacttaatgggcatgatgatcctaacactgtcacaagcatgcttgatccagtaagtggtctgggacatcagtcatttataactgatgatgctcttgatcaagtattctccccaccactgttgttggagacttctttatttcaggatgcatacgaggacttgcttggtaagtcttcccagactcattgtcacgcttaagtagttattaggtgtacgctcaaactattgtatgcatgcaagtctttaaggttttgtgttgtctgaattgattaggcctcagtaacagtctgatatttaaggatctgtcgggttgaaggaatgtgacgaatgattgaccactcaatctgacatgacttatttggtttgagaaacatgatagttggaggatccgtaataccttaagccctcaaatgcatagctcagtaggaaaaaaaagaggaattagatttatatcccaccaaaattatggaatgacccattatggatcaactttgacaacttattttactaataatatttaaaataaaaagtataatattgatgtaaaaaatgtgtagcaattctaatgatgtcaactattacgataaatcaaaatttatttatatataatagcagtagaaatttaaaaagttatgacgacattttttgaaagtcatattgttttagagagggcagtactttgaaggcaagtttggtgcatccctttctgttttgattcacaggtttgcagttacagcacccaaaaaaaaaatcaaacttacctgtatgttatctgttatgcagctccattatctgaaaccgatacagctttaatggaacactagagctcacatgtacattgtgtaatactttgaccactgccgtaagcttcagtgcttgatcacagcctggaggttcttatggtttggttctgactgctgctgggacatttttggtgaatttcttgctggttgtgttgcttgccagttgccaccagcttgtgagggatgtctgcgtcagaagaaggggtattattagggaaagttggggtatttggttttggggagaggaaaagagtgttttagcggtgatatagatgtctgtaatgttccagccgttgtgtgcacagtaagataagattcaaaatcgtgtgtatttagcgtacattgtatgtatttcttgtaataatttgcttcgcttaaaagtttttctgatgtgcgggttctgctgttctgcacttggtgaattgcaccggcgatttgcgggaaagcaatctttggagacatacatcgatgggggaaaatgtcgaaaagtcatgaactaatgctgaaaagcttggagtccacaggtgtgacatctggtgggattctgatggttcgatgaatgaagaattttgagaaattccgtgcatgaagtgcccaccgggcacctgccaccgcctctcatcggtaactttgcttatctagtccgaaccaaactggaacacttgtgttaactagtaatcgtgcacgtgcattgcacgtttcccacattagttatagtaatcatataaaaacacttcaaatttcttgcattttcctgtaatatatgtcaggcaaaatatacaacatactaaaaagtttaagaactatatgtactataatgtaacttaacatactcctttaaacaataaaaaaatgcaaagcagctaacaataccaaacatataatttgtcatagcttgataaacacttgaaaagctcaaagcaagatatttgtatttatggtattgaattaaaccccacagcctacaatatcttatcaggaaaaaagactcagatcttcaccaacaatacttcaaatatatccttcatggccagcaactaaaaatagcatttacatgatcaccaatgaggtgtatacagctcctgccgtgggtccacagaagttcatgtgatctgcaaaacacaaatttacatccatttcacttgtaagaaatggtcatcacatataattccaaaaagaatattgtctatagttgccttaattgaagtaaaaaagtagatagcaagtgtgaacattccagaaacactaacatttgtcaaaacgcctctatattttccttgaccacaatattaatctaaagtggtcatattgctaaactatgcacacacctgcagttgaagtggcagccacgaaaggatctaccaatcttaaaatctggagaccaatatctttcatggaattccctcaaggaaagggttccactattagactggaaaaagggaaacatatcaaatcatgaaaaaggcataatctgaaattggaatagcgtatatctttttaagatttaatttaatcctggagtccacacttttttcgtgaagctacaaataaataatatatccataatggtgatgaaaaggatttaaaacatggatagtagcactggattaaaaacatgaaaagcaccttacaatccaaaagcttgagaagacattagcatcaggcatcttcctaagaaaccaaatgctcttttagccacatcaaaattttcaagcaaactacgtatgtccaaataaaaagaaataacaaaccgtccaagcaagcatatgccgatggataaaatttatgaattacatcattagtaattagaagtcatcagcacaaagcaaatattcaaacttcccaaaaacaatgcaaattatcagaggagaaacatcaaattccatgcttataacttgtagaatatacactggattcaactgatgcactttttaaggaaatgaagccatagttccattgtcctgagctccaaaattgatcattggtatatacaaaggggatattcacttatatttaagtctgctagaataaaactctcttgacctatggagttatatgtgcatacatacaaactgaaagagacgcttacatttaagcttgaggacatttcaacctgataggctcatgtcaaaccaaccgttgaaacaattccgaaattaagtgattaccagctagagtgacagccaaaagcaagctcaacattgcaatggggaaattgcgattagggaaatcttgcccgtgattgcaatttcggaacaaaattttcaaaattttgcctccccccccaccggcaagcatatatctcacccgaaatttctccttttttcatgtttttgtgaatttggtcaaagtttattctaaatcattcaaaattcgtcaatttttcaaataaattcagtgattttggttctttcgccccctccccccacggaaaaaaccccaatttctagaatgcaaaccctgaatattgcagtaaaactacagtgaaatacttggtgcacaaatgtcattacgggtggcaccgcttcaggttttttttttcttttgcaaaaatttgagagcattacatcacctatggcaattgtagattgatgcatccttccgctgcttgtactcatggttctgttgaaccttagcttgctactgcttacaattgagcaaagcatacctcatccaagcttgctatcttctttaactcgagagcacttaaattagtggtattccctacggtgtttgccagtaaattagaattagttaactcaaacagtacatgatatatagtgaagaaatcacaagcttaaaagctgttacataccatcgatctgtataaattaatttcagagatatacaattagcaattaactggcagcggcataacagctttgcaaaagaagcgaacatgatgtgtattatttacttgtcactgcaagcaatggtgacgtaaagcttcctgcattaccgggccgagctgcaaaggtgagtcgtgataaactttattacattcagatcacaaatgttgattaaaatattttttttgagcattcaatcgatccagagtactacctgatgtagatcgaaccactatacatgaatatttgtcagaaccactatcaatgtttgtcgttgatgaaatcccactgatggatctgagcaaccaaaacatcacatcagcatttgcatgttcctagcaaggccgaggaaccaatcatgagtttgttctgcgtattgtattcatgcagaacatatgcgccaagcagaacctgaacccggacaggtcgccttcaatctcactcaaaatttgtaaagctagaaggaacaagaaaagggattgcgatgaacaagagttgtagccaatcgttgtacttacaggacagatcggtggaggaagaccttgggggtgcatgtagcgacgcaactgctcgcttgcggcggcaggaaagggaccacttgcgttccggtatttgcacgacgagcgcggccgcaacggcgaattgcctctcgctcgtggcggcaccaggggctccgacctcgccttcgtgtatcggtgtgcgactaaggatgaccgagctgcggtggagtgtacggtgaggcgctggagtggaggaaggctctcgccggcgcaagtggaggatgttggatcggttgagtgtattcaagcgctggcgggggcaggccgcggttggggaagacctcgacttcgtcgggggcagcggtggacttcggcggccaccacggatggggaagaactcggctccagcggcaactggggacgacgtcggctccggggaagaccacggctccggcggtggctggggatgacctaatctccggcgtgggcagcgggggtggcagcggaaggggacgacctcgttgccccgtcgcgaggaggagggaggatgcgcacggagcgaggagacggcggggattcgtgggtgtggaggagaagcgaggaggcgcggggattcgccgggcggcgaggaggagcgaggaggcagcggcgaggaggagcgaggaggcgggggcgattttgggggcgaagttgtcgcggcggggaggagcgagggggcggaggaggcggtggggatttgtgcggcgtagtcatcgcgtgatttctgaataggtggaatcgctcatcgctgcgcacagttaggaggatagcggacgtatgagattaaatcagatgacggatggacggtagagatttgattcgggtgatttccccagtaggattggagaggtacagctcctcttttttatattagtatatagatatagatatagaaattatactatgtataccaagaagggagggctagtagaatcaaggatgtagagcttttgtatttgtataggagtcttgacttagtctgcatcttagttgaaccattaatattgttacctgcacaatgttacgttggattggatttctcttaatttgattcactagcaaattgcatgtgccttgcacgggaaaaactaacttatgacagacattatataatttggattaactatttcttgtacacttaatacaattttttttgctgtgtcggtagtgaaggagcatcccgaccaattttgttagggtataaattgcatcttgggccgagtttagttaaaaactttttcttcaaacttctaatttttttatcacattaaaatttttctacacacacaaacttttaactttttcgtcacatcgttttaatttcgtcaaaactttcaattttaatgtgaactaaacacacaccctggaccatctttttttacctttgttccaagttagacttgggtaggacagttttcactagtctcgactagggaagtttgcataatatttcactttagaccagttcttctctatcctctgccattgcggtcctcaacgactttgcgcagctcctgacctgtcttcctggaactttgctcctccgccccagctccgttcattcccgagcttgaaagtccaaacgattatctccgtcagttcgcttgctccatgtcaccttcacccttgacatcccactcgtgcgacaagcacgagagagagaggatgaagaacttttgcctgagcaactcgaaatggccaacttctgctgctcttgcatcctctgcgtgggcggataccgaggcaaacgatctagttgacgcgcggcggcgtaaacctcggcgcactcgcggccaaagcttacatccaccatcttccgtgcgatctggtgcatgttcgcaactgaccctggcgaaagctcatcgatcaccacatcctagtctatcaccggcttggcaattgggatcggcttgccgccgtaggccgtagccttcctcatcaccaatcctgtggtcttgggctggttgcattgcttctacctaaaagtagtactctaggaggcaagcagaggagagaatgggccggcggcggctcgacgctcattggcgctcctgcagcccatggaagacgattaggagaaggaataagttcactttacatcccttaatttgttgccgagtttaaaattcatcccaaattgcaataccacatacgatgtgcccctcaacttcaaacaatacaaataaatttcaaggcggtttggatgacggttttggctgacatagcacctacgtgacaagtttgacttggtcctcctacgtggccgtgacgtgtcactaaaagcaaaaatataaaaattaattaattttcttagaactgtggggcccacatgaattcttttcttattctttctccacttagcttagtatttatttaatgagggaaacttagttctttcttctgtttgtcacctaccttttgaatcacttaacccctacatagactttgatatatacaagtaatatatagctattagcatagtactctcttatcatatcttccattgggattaaataaatacgatatattggaatactctcgagtgaaatgctacaatggtatatccgtgcgcttgcggattatatctgtgacactgatttcacgtagaaggcttgaaggagggagaggatgagagtgaagatctacttgtctctcgtgccaacctggtgatgagatccaagatccaagatactccctccatctatttttgatagtcatatttccaaatctgaaaaatttatttttgataggcatatttcaatccaacaatctatcctcttaatgactttattagatttaatgcgtgactctccattcttccacacatgattggctacataggcattgagaaatgtaaatattaatgaatcacttgcttacgagaaatgactagtagcatgtttaaatggatgataagtagaattatttatccttagtctgtgtgtcaagatgaaatatgactatcaaaaatagatggagggttccctgcaaaaaaaaaatggagggagtacatgttaaggactgagctaagagaaggtgaggaaggaagacctcatagacaatgcctctagggaggtcgtgccaccaatgcacaccaccatcgtccatctaaattctttacaactcctcatttcctatgttccaaacaaacgaaaaccatcacatatttttcttatgtctttcattactctattttgcatatacaatcatctcatagggattcctatattttcctataattttctccattcgtaaggggttataagggctcgaaaagcgcatttggaaatagctgattagctacacctgaaacatgggcgcatctgattaattcagtattaattattaaaaccatcaaattattttattttttcaaaacaactaattatataggatatgtttggggagtttttacggtccaagatcttcgtccatattctaagtagttctagaatctagaaaataaattctctagaatatcaaaagctgggtaccaaccagctcattctcagaatattaaactcccccaaatagaccaatagaaagtttgaaaaatgtgctaacagaaatcaatgaagtagtcaagctgaaacttttaggctgtgttcaagaggacgggttacgacacgtacaatgaagcactcattagcatataattaattaagtattaacttaaaaatggattaatattatttttaaaaataatttccctagagaacttttacaaaagacatatcacttagtagtttggaaagcgtacacgtggaaaatgagagagataagttgaaaaagtaaatagaagaacaggccataaaggtatacagacctacatgtagagtaaataaggccgtgtttagatctaaagtttttcttcaaactttcaatttttccatcacatcaaaacttttctacacacaaacttttaacttttctatcacatcggtccaattttaaccaaacttttaattctggtgtaaactaaacacattacatttagcctagctataccagattaccagtacatgaaaataaacttaaaaaatacgctctcaatgtccaactaataatacgtgtagacgaaaaaaagagccacattccctcgaaagaaagaaagagaaaaagagccacatgtaaaacactccggaggggagattaggtgagcagtccaagtgtctgcgcgtcctgtcccagttagtcaaaaaggaggaagcagtaccgctgctttcagttcctaccacacacacccccatcctcaccgatctctctaaacccaaatacgcaacaaatactcaatcgtcacatcttaaaaaacaaagaaaaaggaagagagagagagagggaaaacaaaaaagaaaagaaaaatcaattcccaaccttgctgctacaaatgcctcaggcttagcaactcgacctcctccccccttctccccttcctcccttctttgacttcccctttcctcctccgtgcgcacgctctcctgattcatacagcatttcgtcggggatgacgtcgacggcgtactcccggccgtcgaagctgccgggcggcggcaacggcagcgaccgcaggctgccgccgcggctgatgaggggcctcaccaccaagatcgagcccaagaagctcggcgtcggcctcctcgccggctgctgcctcgcgctcctcacctacgtctcccttgccaagctcttcgcaatctactcccctgtgttcggtgcgtgctcccctaatcccgatccgccctaggagcttacttttggttaaatcccctcccgcgttgtctctcgaatccaatccattttgatttagtctaatgggagctgttttgaatccgttttcagccagcacagccaacacatccgctctgatgcagaactcgccgccatcctcgccggagacgggacccattccgccccaagaaactgcagctggcgccggaaacaatgacagcactgtggaccccgtcgatctccctgaggacaagtcgctggtggaggcgcagcctcaagaacccggcttcccctcggcggaatctcaggagcctggcttgccggcggcgctctcgaggaaggaggatgatgcggagagggcggcggcggcggcggcctcggagataaagcaatgtaaggaaatcttgcctctttcttccgctcccttttatttgcgcacctttactggaaggcagagcaagctacagtagagcaagtccccagttgttgttgagcgcaagcaagcaatcaatctcgtttggatttggtagagacgcacgagatctgggcggtgttttattggggatttgatggtaattcagtctcgttggtttggttaattcagccgagaagaagaacggcgtggcggcgggtggtgataccaagataaagtgcgacgagaacggcgtggacgagggcttcccgtacgcgcggccgtcggtttgcgagctgtacggcgacgtccgcgtcagccccaagcagaagaccatttacgtcgtgaacccgtcgggcgccggcggcttcgacgagaacggcgagaagcggctccggccctacgcccgcaaggacgatttcctcctcccgggcgtggtggaggtgactatcaagtccgtgccctccgaggcggcggcccccaagtgcacgaagcagcacgccgtccccgccgtggtgttctccgtggccgggtacacggacaacttcttccacgacatgaccgatgccatgatcccgctattcctgacgacggcgcacctcaagggcgaggtccagatcctcatcaccaactacaagccgtggtgggtgcagaagtacacgccgctgctccgcaagctgtccaactacgacgtcatcaacttcgacgaggacgccggcgtgcactgcttcccgcaggggtacctcggtctgtaccgcgaccgcgacctcatcatctccccgcacccgacccgcaacccgcgcaactacaccatggtggactacaaccgcttcctccgcgacgctctggagctccggcgcgaccgcccgtcggtgctgggcgaggagcccgggatgcggccgcggatgctgatcatctcccgcgccggcacgcgcaagctgctgaacctcgaggaggtggccgcggccgcgacggagcttggtttcaacgtgacggtggcggaggccggtgctgacgtgcccgcgttcgcggcgctggtgaactcggcggacgtgctgctggccgtgcacggcgccgggctgacgaaccagatcttcctcccggcggaggccgtggtggtgcagatcgtgccgtgggggaacatggactggatggcgaccaacttttacgggcagccggcgagggacatgcagctccggtacgtggagtactacgtcggcgaggaggagacgagcctgaagcacaactactcgcgagatcacatggtgttcaaggaccccaaggcgctccacgcacagggatggcagacactcgccgcgactatcatgaagcaggacgtcgaggtcaacctcaccaggttccggccaatcctgctgcaggcgctcgacaggctgcagcagtaactcgtctatcccaataatcgcaggcagctcatggcacacatcaatgtatatgccgggacgagacgacacgacgaggaacaagaacggatactagtatattgtactgctgcttgaaagagatgatgatgatcttaaccggaggagaaccatcagttgttggcgaggcggtggaagcttttcgcatattggtaattggttgggttgtccattttgggtttgtaacaatttgcataggcattacacaccaaagatgttcgatttttttgttcttcttacacttcttcacttcgccagcccattcaacactatacattcttttctactaatacggagccaaactaaactatggtgtttaattattaaaacatcaaattggtcacccaaacaaaacaaagtggcgatgaaagaaagatccaaatctgagagttgtttcagacatgtgcaatctcctctaataaattgaacaaatggttgttaaacgaatctgcatcccgagcgttgaaggggcttagctggtgcggacgtgccagcatggaagtgttcgtggagaaggaaaatggattcgatgctctgtccaacactggtgaactgctgtatatgcacccgcctgctgcctgctttcagcttaaggaaaagatcactaataattgaaaagcacaggctaactaaccgggctctgcaagaaagctgtgacaggtaagtcgtaactagttttgggcaatcgaataccttctctcttttcttctcttttcttgagaggcagacagggagatatagagaaagaccttctccttttatctttattttttcttttttcctagaaccttcttgctgtcttttggtagggaaagagactagaaaatggaacgatgatgaatgcatgaatttcccataagaaattggcaagctagcctcaccttttcagtatcgtatgcatcacgcgaaaagattaatcacaagagggtgacccggcaacgagaagaggagatcagccaagacaatcttgtagccgttagtatgaaacacacgattaatcacaagccacgccatgctcttcatgccgtcacttggatggacgcatgcaaactaagtcccccttttatttatattaggaaaccataacaaatttagaggattttaattctacagaaaaaattcttacgaaaatacttgaaacaaaatattgattcatatactgaggaaagttaatatgagctccaacctttcaaaaaaaaaaatagtcattcattcttatcgattcatgtatttttctaccgtttattcgaacaataatttatgcatcttttttgtgttttgtacttatgtttctattaaaatcaagtgtattttttattctttgcttttttgggtcctgcaatagcccttatatgtaaaattgtttggagcacgtgtgtttgagtagtcatatttctcacgaacggagtggtagatcattatgctacattttttttcctccagaaacatatgtgcagatgctggcacatgtatcgggcataaatttatctggaatcaactcaggactcaaccagtatgtcagtgatgccgatttattggcggaattcgtagactttgtgtgcccttgatctggccactttgcgccagtcactacaaggtcaaccgtagctatcccataacctcttcccttagtttcctactctccataacataatcatgttcgtgtagacgtacactactgtttgtatcagatcgtgacgtttctggatgtgtgtgcgcgcgtgtgtacacaagtttctggatgtgtgtgcgcgcgtgtgtacacaaactagaaatacttacatttttttccttttcttcgccattacaaattcacaattagaatataagtattttagtttgtgcagtatagatcaaaggttaatataaaaaaacttcagcaccgctccaaaaataagggatggatggcgtgagaggaaggtgggataagattaggagaaatttcaagtggagaaaattgatgggacaactagtattatgaataatgttagaaatcttaagggtccctttgaattggaggaaaaacatagtaattttaggccccctttgattcagaattttagaggattttattcctataggaatttttcctacaaagccctttgaatcaaaggaatgaatcctatggaatcctatgaaatttctatggaatgcctcttcccatacaagttttagatgaattttaacaaggggtagtacctcatggaagaaatcctttgaggttcaatcaaacggtcattcctatgtttttcctgtattttgcaaatcctctgttttacatttacattcctgtcagaatcctatgtttttcctattcctccgttttttcattcctgtgattcaaaggggccctaggatttcaatcctataggaaaatttcctatgaagccctttgaaacaaaggattgaatcttatccaatcctttgaaattcctatagaatggacaattctatagagattttggaggaaatttagcaagagctttaatctcttggtaacttttctttaagtctatctctctcatccaattcctatgtttttcctgcggttcaatcaaacggtcattcctatgtttttcctgcgttttgcaattctctgttttacattcctatcaaaatcctatgttttttctattgttatgttttctcaatcttacgattcaaatgggcccttaatgtttaaaaattcaagattcaaatgctaaaacatctagtattttcaaagagaattctgtaaaagaaataggaaacgttgatggagtgtaggagaatgaagtaaaggcatgcccaacctttggcacgaagaatgctgtgtcattcttgcacaagggggaaacgaaaatcatgccactattgttggtccagagagaaagcatgcaagaaacgtctttgctttgaacatacgtgctgtctgcccaaggcatgccaagtactctggaatttatgaaatcctgcagctcacaaatcttttacgaaatacagctcgcaattttttttagtgaaatccagcaaacaatttacatggcccgaacaacaacggcattgtgttttgtttgaaatagaatggcaaaaattaggtgaataatgttacaagaagacggttggtttacattggcatttcaggaccaacggcaatttgttcgttcctgcctcgttttcagagaaatctgatcagctctcgcctctcggcttcagagaagctcccttgctacaaaccaaaccaaaccccctccacccccccccccccccccccaaaagtttctgttcgaagtaggtacaacaaataaaaacaactatggtttccatgtcacagtcaggtcagtagcagtttggtaggcctaaaaattaatgcgcacatttgacactgctgctgcaacttggacctctatgtttcccgttcatttctccaagaaaagtcggataaaaaaaaatttcgtgacacgttttttaaactgcgaaaattttctatatgaaagttgctttaaaatatcatattaatctattttttaaatatgtaataattaaaactcaatcaatcaaacgttaatatcaacttgttttacgtaaaataacttaatcttcatattcatcttcatcttcagtcctagatttctattactgagtatactagtactactacaaaataaagcttgattaatcaagtactagtactccctctgtctcattttaagtgcagtcgtggatttccgtacccaacgtttgacccatccgttttatttaaaaaatttataaaataaattttaaaaaataagtcacatataaagtactatttattttttatcatctaataacaacaaaaatacactaactataaaaaattttaaataagactaacggttaaacgttaggtacagaaacatttaaagtgggatggagggagtaggtgtgcacaaggcttggtcgctgtcatgtacgttggccacgaacactgacgcaacaagaaattagatcaatttgttttgcttgtgcctcactccataaatgatggttatgaacaaaaaaaaaacaaaatttaaggggattataaacgtgtagtatcggaaacatggcccctttaggatttagccttgtcaagtggagatgaacgtagatagttactaattacgcctaaatttgataccaagattcgaaatatgaaaacattgtcaaaattttgaaggcattgggtttccttcacggggccagtataactgtcgcctatggactagtttgaccgatatgttgggcaggtctaaccagcggcatgtgaccgccgatcagaccgacatagtttgactccgagctgttttcgtcgggtcttgggcttgcttgctcaggaatgtatgcttcgggttttcattggtttctaccctgagttagatgtcgaggagaacctatagaaggcaagatcaaccccttaacaagggctaagcctggtttgattaaaaacccctcaacaatctctcaatcccgacacaatcaaatcgttcttttacctttattttttagccacattttccaatttaccctagttcagtccatctttatcgatttgcatcgtaaattgttcacctttgctgctagagtgcaattatccctttgtaattaagtttgccccgtaaacctttcattcgcccatgagacgggtggttatcttcaattcgatctaaatcagccttgtggctggttttgatacctaaatcggctctgctagcctgtttaatctttaaaatccaccctgaattccactcgaaactcaacgctgttgttggtttgatctttcggtgagttcagataactaagatttggaagaaacattaacgacctgactacaactgtacgagatgttgtgttgcgcctttgcgatcgatacacctctccatgggttgttgatcttgccggtgcagatcaaccttattcctgcaaacaaatcgaagaaacaagcaataacaagataaaagtaatctgaattgcagatagaaatgaatacacacggtaagttggtgtttcgaatacaagcacacgaacggtctagcagacacgcgcactgcaagaaagtagcaatggctaaactttcatctaaacaaaacccaagaaaccctaaaggggtacctagctatttttaacggtgggaggacaacctaggagtccctagggtcatgctccacctggttgaggcgcaccccacatggctcggggtcccaaacgaagttacatgcccattggtccaatataggtgaggcaacaccttgtttctgcatttgtgtccctctgggaaggaatttcgcactgaggttggatcaattggaaagaggactctgagagctttccatcaagtactcacgggctgaaaacgaagctcgtatactgatttggcggccgtttgagcaatgtcgcagttggccgaatcagattccagcagttggtcaacttgatcttgatgtgagcgacggttgtatcaatagtagtcatggtcacatcatactccccttcttcacggaaaaccctcctctgtttttccatgtggtgctcttcacatagtcgattcaaaacaacctgtttcatccaatcaaaactagagaaactcgaagtagtgcgattaacaataacatgtttctctaaatccgaatagatgaaaactctaagcaccaaatatatttctctatcattatattcgtcaaaggtatgaaaaatagcattagttggacatgctaatcagacttagcaaataatttctccttcaaattatcgagctcacaaaaatcatcaaactgaacatagcgcaaagtatttaaagaagatagcaattcatgtgaataacatgtgaataacatgcttaaaatcagcgcagtaagatataacagtagaaatagcatgtccattcactagttgcggcatagatataagtgaagcattatcacacaactcttgtttatcacaataaacaacaagtaattcaacttgtgacaaaggcatctcagcaattggttaatggttgctctattatagcattaaaagtgaacatgtgtagcttagctcgagaatacccaccttcatttatttcagcaccatttaatttaccttacaaactttcttcagacatcacaggtgcttcaagcttctcatccgtcttctcaggaacatcattcttcttcttttgttgaatgatcggaactccctgcaaaacgttagtaacaggagacacaaaagtttgctcctcccatgtttgcatgtcatcattgcacaaggatatatgagattcagaaacatgaaataaatcacattgttcatgctttttcgcatttgatatgatctgactctcaatgctgcgagaaagcatgaataggtgtccgatatgattatatgtcacattagtaagcatgagctgaattttagaattaagccccatgaaaaatctgcacattgtgttttcattgcactcttttagatcactgtagatgatacaaactttaaatttatggatatactccctaacagttctatcaccctgtttcagatgttctaatttctcacaaagagtacttttctaataagaactcacaaaacgctttctcatcatgtttttgcattcatcccaagtttcaggtttgttactacttcctccgtttcataatataagtcattctagcattttccacatccatatggatgtgggaaatgctagaatgacttacattatgaaacggagggagtaacataactccaccaaaagagagcggaagaggtaaacttattactaacagccttaatcatttgagcatcagaaaaatcatactcatcaaattcattatctactgctagctcccaatcaatatatgcaacagaatcatacttctcatcgtagaatggtaacttagattcaactcgtgcaaaattataggcaggtacctcatatgcattgcgtggagaagtcgtcatatctcatcgaaggtgaagaagtcaatgttctcgtattcccttgtgcgatcttgtcatggttagtagcaaacaagaaagacatacaagaatgtgcacgctcctatcaactactaggtagtggcagcccaaatatcacacacactcaagcttttcaccgagctctgacaagttcttaccaatgcaagaagaatggcaacatacaacgactcaaccaagcactccaatggaggttggatgtatcgatgccttggcaaacacttgttgtacggctgcaatcaaatctgtggagctctgggtatacttaaatatgtggcaaagaaatagcaaatgctcaaatcagagaatgcaaagttgaatgatcgttcaaagtcaagtaccgtgctggtcctaggctaggacgtactagagatgcgagcctagacacaaacgataccacaagttagcaccacaaacaactcaggcacataatgatatatgaaagcaatctcaaacgaaacaagtaaatttcttttttcccttcttttttttgggtacagcttttctttctttgttttatgcacctttctgccttttttttctcttcttttttttgattttttaaaaaaaaccaactcaagggcctcaatgcaagattaaagggactcaaatgtaaatataaaaattatagggactcaactgtaaaagtccaaacccaaaattagatatacaaaaataaaatgctcatagattctgtatttgcaaacagatctccaatccgatactaaaattttttcatcaagctatatgggcaactcacagtatggattgaaaccgtgaggagaggagaccgtggatctaggaggtctcggacacgactcactaggtggagattgactcccgtcgaccttaggatcgaaaggccccacgtaaaaacagaaatagatctctcccttcctttttctcttctctgtgttggccaccaaacggaaaccaaaccaatctacacactaattcaggatcttttgctgaaaagaggctaggccacgtcattagataaaaaaggaaccgttggatgataactgtggcagattattcaccgttggattgcatatatgttatttaaggctctagataagtgtggaaagtagtactggtattagttcagtcaacatgcatgtaaaaagttaaataaaaaatggaataatccagaaatttgtggagcccttgggaaggggaacattccaatatattaatactgaattaatactgaataagggcgtgtttagttcacgtcaaaattaaaattttagttgaaattggaacgatgtgatggaaaagttagaagtttgtgtgtgtaggaaagtttcgatgtgatggaaaagttaaaagtttgaagaaaaaatttggaagagctaagaaatgagcttttcagtttcccatgcaagtatgcaactgagtcctctctacacaagcactcagtatggctttagctgaaacctttgcacttccatttcaaccttcacaaatcacaaacaccccaaacccagctttcatcgttttcttcttctccaaattgactgcatctggaggcctggtcgaagcttgccgacgtacggtgccggatacaagctccctccgcctctttgaggccatgtaatgaggtactacctcccctctgcttacatctcctccatttcttgcatctcaatctgaggtcgcatccacctgctgcaacgagacggagagcgcttcgatggtattatcatatcatgtttatgtcgtgtttgtattatctggggaggtcagaattgagatgctgggtttcattttctcattagacaggatatacttttgacagggcgcgcctgattttctagtctaatctacagaactctctcccatttccttcttcctcctctcagcgccggacacaagcacggcaaaagcaaacacacgggtaggatcagcaaacactagatgcaactcaacaacttcaaaactaaccgacataaacttctgaaaagtacaaaaatagaaccgtggcagtgagcctgtcggtgacatgggaccgggggtatcttgactagaggtttggggcagctgcagtcacccacgtggcctggccccctcgggggggggggggggtcgggcccgagggtgatgtggccgcccctccctctgtcttcccgaggggtcgggccgctcccgtttcggccccgagggctggggcgccccgaccccctgtgggtttggcgccacgtgtgtgggttaggtgagcacagcggcgctcacctaaccgcgtttattgcgggttggacgagcgccccacgccgcatttaatgcagcgcagcacactcgttcggtccgtgacaggtcacagtgtgtgaccggtcacagaccggtcagatcgcgggttaggtggcaacaggcggcctgacacacgcctcgccccgtcccgtcggaatgatgagagcctccaggcgctcgtccctagccggagccggcgtgggaactcctggagtcgcacgtcagccccggccagatacattccaggcttcatcgcaaccattgcaaggaaatcattgtatgaagaagggcagacgtgtagcatgctgaactgacacgtggtggacaagaatgaccggtctgtgactggtctgacgccggtcgcgtcatcggcagacaaccgtgctcccacgatgcatctgcctccggtggagtggaggtaggtatgacccatcttgtcggatggtcatttggaaagcagccatggcaaatctccgcccattaatgagggagtaacagggagatccccggtgtcaggcgagagacggcgctgagcctcactcaaggacaagttgtgatttagcttccaggcgaaggtgcaagccaagttttggtcaagatagggtaggtccccacccagaagaaaagtaggtagaagtggtgcatgtaatatccccttgagatataaaaggaggaccttgcccaccaaaagaaaaagaaagaagaaaagaaaagggggggcgagaggggttctggagcctgaactctctggctctccggctctctgtagatcttttacacacagatccaccagaacacaggagtagggtattacgcttctcagcggcccgaacctgtctacatcgcccgtgtctcgtgcacttgctctctcgcgaacattctccagatcgatcgagggcgaagaacctcacttagcgcccccggccgaaccggcaaaggggggcctgcgcggtctcccggtgaggagccccacgctccgtcatctggcgcgccaggtagggggcgcgtgtgtttttctaaggcctcgtcctctttcgtgtgcgccaagcttctcccgctcagcccaatggccgaacgggcagtggtgcacaatctctctccgagcgctagcggtgaagacggggagcagaacccgcgccgtcgagctcgtactccactgtccccctctcgccgaagtcttgggcgggaggaggcgctcgaggaggtcgaaaaatccgcgacttcgccgcacgcgggcgatggagaaggacggcgagacggggagcgtcgtctcctcgtctacggtgatggcagcacgccccagggcgcgctccaggctgcgggcgcgctcctgcgtcacccgcccgtcatccctgatccagagactccaactggacgttggctagatgacgtggccaatttggtcatgacggcgcagcagcgcctaggcgccggctggcggtcctccgccaccaaggccactggcgttgctactgctggctccgtgtcgtcgaggcggagggcgcggcgagcggcggccgctacccgccgttcgtccgccattccctcgtcaacgcctccaacccaagaagatgtgcttagggggccagatgcccgcttcaatatcgagcgccggcgcaatgatcgccgtgctgcccacgcatcggagggcgcttccttgtccggagcgccacttcggtccgggcacgggggccaccccccgtgtccccggttggcggtgccggctgtcgagcctttgtggcaagccttcggaacgtccgttggcccccaaggttccggcccaccatcaccgaaaaatacgacggaagcgtcaaccccgccgagtttctccagatctacacgactgggatcgaggccgccgggggtgacgacagggtcatggcgaatttcttccccatggccctgaaaggacaggcgcggggttggctaatgaacttgccacccgcgtcggtccactcttgggaggatttgtgccagcagttcaccatgaacttccagggcacatatccgcgcccaggtgaagaagcggacttgcacgcggtacagcgaggggacgatgagtctcttcgctcgtacattcagcggttttgtcaagtccgcaacaccataccgtgcatccctgcacacgcggtgatctacgcgttcagggggggcgtgcgccacaaccgcatgctcgagaagatcgcctccaaggagccccagaccaccgcggagctttttcagctcgcggaccgtgtggctcgcaaggaggaggcctggacctggaactcctccggttccggtgtggcagcttcggccgcccccggatccgccgctcggtcagggcgacgggacaggaggaggaagaagaggtcggcccattccgacgacgagggtcacgtcctcgccgtcgagggcgctttgcgggccacccgaaaggggaggcctgcgagcgacaaaaagaaggaggccggcgctcccagcagggagcgcccgaccggcaagtggtgcaccatgcacaacacctccctccacgacctcgcggactgccgcgcggtcaaaagtttggctgagcggacgaggaagtgggaggaggagaggaggcaggagcgccgtgagggcaataccccggcggctcccgccggcaaccggtgaggtgaggccaagcagaaggcccccgccgaggacatcaacgatggcgacgatgacctagggttccaggagcctgaggccactgtcgccaccgttgatgggggagcgtgtgctcacgcttctcgccggagcctcaaggccatgaagcgagagcttctggccgtggcccctacccatgaggcgacgtggcgggcgcggtggtcggaggttgccctcaccttcgaccagaccgactgtcgcgaccgggaaaattgccttttcccgaacgctagtgtattaatccccgtcccaggaaaagtcggggtacaccatacaaacatgatataaaagacacatctttattatatcgataatatttacattattacaaaggcgcttaaggcctgacaatcaaaataaacagcagcggactagcgggcctacggctccatcttcacaggcgctcaactggggtataagccaggactccacctaagacttcttctccaaagcttctcttactgaaggggggaaagattgagcaaggatgagtacaaccacagtactcagcaagccacaccggagatgcataattaatgcaagggagtacaaggggataataatataggggttaagttttgcagaaatccgcatttaaaagtcacttagttgcccaaagccattttataaggacgatcctagagctacacaatattattaatcagggtcgtgaacccgcacgaacctgccttaacccaaggcctacgatgattcagaccgaactggcaacccgaccctgggtcccagctcgtcccaagccaacccaggccaaccattccacattttagttgttgagcaaattttaagaattaaaacactaacttgggtacattgctcggcttgcccataaccgagggcgcggctattcgaatagattatactctgatcagaggtgtacatctttacccacaagacacatctccctcacgtgcaaccacgtgccacataccaccacggtatacagacggaagacgtgacatagtttccaacccatcctagccatagacaagagtatcgacccaaccccacctacggccggaacctccgggacaggtaggcaggaatgagcccccagcagcaggacaccagccctgtgccatgacatctctactaccgggccgcagctcgtgtagccttcatttgtcctagagatgtccatcgacccccgacttcgtccatctccatccgtgtacttttgtttataaccagactgagccacaaactaagccttacccactagacatgtggaagtacggtagtgctttgcaacagaggcctgagcttaatccttatagtacccgaggtacgactagcaaaacccaaccacgcacctcgagcccagcctaaaaccattttgggggttttgaatagagggggaggtgtgtgtccaattccacaataatccaacaattccctactgtccaaatgatatgagatttcccaaagtctaaagttataaaaccacctaatgttgcctaattaaccagcgaagcatctacctaagttcatactagtggaaccataaatagagtacccactagttggggttttattttcctggggtgaacaaggtaataataacaatagcaataataatgtcttaacaatgataaataggcatggctaaataaaacagtgataacgcgggaatttagataaagcggtaatgcattaatttaaatcaaaataattttataaactgggattcaatatgctcaaggatgatgtgacttgccttgctcgctttcccaaacgtcggcttcaacttccacgaagagcggatcttccgaagctgcagcgtctacacgaccaacggaaaagaaaaggattttactctaataaactccatataacaagcagaaacaaagcacaaaaatgggttcttgacttcttaaggaaaaattagagacttgaacggtccaattccgagttcaaatggccaagttatggccatttgaagtttatatgctctttaaatggatatttgcgaatttcttcatttaaattttaatttaaaatcggatttattgcgtcaaccgaggggaggggcgcgcggaccgggtccatgggagtggggcccacgcggcagcctctcggtccacggtggaccgggtgcacgcggcttacgccggccggcgccgtgggtcccacgcgtcagccgcacccgaggacgcgggcggctgacggccgggccccacatggcagccgcggggcgcgcccgaaggcggcctcgccggcacagccgacgggaggcggcgcgcccgcgccccgatggtcgtcgccgccggtgatcaccggcgcggcggagcggcgcccgagagaggggagggaagggggaagcgaaacggcagtccacggctcaccccgggtcgacggcgacgacgggaacggctaccggagcggaggaaggcggcggcgcggctcgggtcgacggggacggcggcgttccggcggtcggcgggcgaaacggaggggtggacgaggtcggcgaggacgcggcgaagccgaaggaggcgatgccgaagcgggcggaggtccggggcgacgatgacggcggaccgaagctcggtggcgacggcggagagagaggacgacggcgcgagctcgattccgacggggagagagagcggcgagcggcggaaacggaggagagaggcacggggagcgtttaaatagagccggggcgagagagggtggccggggaagggaggaaaccggcgcaggaggtcggccgccatcaatggcgccggcgagattaggggagcggtttccaaccgaatccgagggagagagggagggaaaaatggggggaaagagagagggaatcacggggagtgatttccccctctttattgcgcgcggggacggcgggaggcggcgggattcgcggcggcggcggcgctagggcacgggcgaggcggcgggagcggcgggaggatagggatgacaggtgggccccacccgtcagcgagggtggcgggcgggcccgctcgtcagcggcacgcgcgcggggaggaggccgattgggccgcgggggagaggagagagagggagggaggtgggccgagccggcccaagaggggaaggggaaaaaaggactttttagggcttttctttttataaaaccattttaactttgtttatttcttaataattattatttgtgctctgaaaattccactaaaatttgagggctcctttttgaccaaggagaatttaacaaaaattctccgggccacatttgaatttttcttgcacgtattttaatgtttgccaatttcttttcgaattttaattaattctattattccttttagagaatgatttttatttcgggatgaatttatcaggacgtgacaccgaccacccaccgtgcgttgcccggggaggacagatcgcgatggtggtttcccccaccgtttgcaatgtgaagttggggcgtgtcctcgttgacgggggtgcagccctcaacgtcctttcccccgctgcctttgacgccatcaaggccccgtggatagtgctccggccgtcccagccgatcatcggtgtgacgccggggcacacttggccgctaggccatatcgacctcccggtcaccttcgatggttccgccaacttccgcacggagcgggtgaacttcgatgtggcggacctcagtctgccctacaacgcggtcctggggaggcccgcgttggtgaagttcatggtggcggtccactacgcctatctccagatgaagatgccgggccccggtggccctatcaccgtccatggcgacctcaaagtcgcgcttgcttgcatggagcagcgcgcggaccacctcgccgcggcatccaagcccgcgggtggcgacgagaggctcagcacctccgtcccagctgccccgaggcagcggatgatcacgtgtgacgaggtcccgatcaagcaggttgccctgggcgacggcccgtccaagaccacacgaatcggtggtcttctggacgacaaataggaagacgcgctcgtctccttcctgcgggcaaacgccgacgtcttcgcctggagaccggcggacatgcccggggtccccagggaggtgattgagcaccgtctcgccgtacggccgggtgcaaggccggtccggcagaaagtgcggcggcaggccccggaacgtcaagccttcatccgcgaggaggtggcgcgacttctggaggccggattcatccgagaggtcatccatccggagtggctggcgaacccggtcgtcgttcccaaggcgaacggcaagcttcggatgtgcatcgactacaccgaccttaacaaggcatgtcctaaggtccaccacggggtgcgaccttttgtgttttctagatgcatactctggttatcatcagattcgcatggctagggaggatgaggaaaaaactgcattcattacccccataggaacttattgttatacgacaatgcctttcgggttaaagaatgcaggtcctacttttcaacgtactactcgaatttctttgggtagccaaataggacgtaatgttgaggcctatgttgatgacttggttgtgaaaacacgcaaccaggagaccttactctcggatctagcggaaactttcgaaagtctccgcaccgcccgcataaagctgaaccccgacaagtgcgtgttcggcgtgcctacgggcaagcttctcgggttcttaatctctgcccgaggcattgaggccaaccccgagaagatacgagctatagagcggatgcgcccccccagcaagcttagggatgtgcaatgcgtcactggctgtatggccgccctaagtcggttcatatcgaggctgggagagaaggcgctacccctatttaagctcctcaaatgctccgggccgtttatctggacggaggaggctgaacgggctctcactcagttgaaggcgtacctcagttctcccccagtcctggtcgccccggagccagatgagccgttgctactctacctggcggcaactctgcaggtggtcagcgcggcgttggtcgcggagtgcgacgaggacgaccctcgctccgcgcatccccaccctgtgtcgactcgacccgggagagagcagggaggagaggcccccgagccgaacggcggcccgaggcccccgacgaccggagctggccctctgcccgcttgtccgacggtgctaggagcccccgacccccaggatggccccggggccactgcgggaaggccgcgccagtcgccttccgaccccgaggtcgtcgacacagaagccgagtgcgccccgcgcggcctctcggacgaaaagcgccctggagatgcggcccctggtgaagaggatcggccccgacaaaaggtgcagcggcccgtctactttgttagtgaggccctccgggatgccaagacccgataccctcaggcccagaagatgctttacgctattctgatggcttcgaggaagttgcgccattatttccaggcgcatcgggtcacggtggttacgtcctaccccctcggccaaatcttgcataaccgagagggtactggacgggtggtgaaatgggcaatcgaactctctgagttcgatttgcactttgaaccacgccacgcgatcaagagccaggccctcgccgactttgtggcagagtggacaccggctcccgagcccgtctccatccccgaggccagctcgggcccttcgcagctgcctcacaccgcctattgggtgatgcagttcgacggctccctgtctctttagggcgccggtgcgggggtcacgttgacctcgccgagcggagatgtcctcaaatacctggtccgcctcgactttcgggcaaccaacaatatggcagagtatgagggactccttgcgggactcagagtggcggctggactggggatccgccgcctcctggtgttaggcgactctcagttagtcgttaaccaggtctccaaggagtaccagtgctctgacccgcagatggatgcttacgtgcgccaggtgcggcgtatggagcgccattttgacgggatagagcttcggcacgtgcccagacgggataacgcggtcgccgacgaactctcaaggctcgcttcctcgcgagcccagaccccaccgggcgcctttgaagaaaggcttgcccagccgtcggcgcgacccgaccccctaggggagacggacgtgcctgaacggcccccgaggcccgtcggagtccaggcctcgggacccgaggggggcgctcccagctcccttagattgattgcttggatcgctgagatccaggcgtacctcgcagataagactctacccgaggaccgcgaagggagtgaacgcgtccagcgcatctccaagcgctacgtgctggtggaagggaccctctatcggcacgcggctaacggagtcctcctgaagtgcattcctcgggaacaaggcgtcgagcttcttgccgatatccatgaaggcgagtgcggagcccactctgcctcacgcaccttggttggcaaggcctttcgctagggtttctattggccgacggctctcaacgatgcggtcgacctggtccggcggtgcagggcgtgccagttccatgccaagcaaacccatcagccggcccaggccctgcagaccatacctctttcatggccgtttgctgtctgggggctcgatatcctgggtccgtttagacgggccccgggcgggttcgagtatctgtatgtcgctatcgacaagttcactaagtggcccgaggcttatccggtcatcaagatcgataagcactccgcacttaaattcatcaggggtatcactgctcggtttggggtgcctaaccgtatcattacggataacggcacctagttcactagtgagctcttcagtgactactgcgaagacatgggcattaagctctgcttcgcctctcccgcccaccccagaagcaatggccaagtggagcgcgccaacgcagaaatcctcaagggcctcaaaaccaagaccttcaacattctcaagacgcacggcgactcgtggatcgaggagctgccagcggtgctctgggcgaaccgaaccacgccaagccgagcaaccggggaaacgcctttcttcctcgtctacggcgcggaggcggttctcccatccgagctcaccctgaggtcccctcgggccaccatgtactgcgaggctgatcaagattagcttcgcagagatgacctcgactacttggaagaacgaaggcggcgcgcggtccttcgagccgcgcgctaccagcagagcctgcggcgctaccatcagcgtcacgtccgggcccgatcactctgcgtcgacgacctcgtcctacgctgcgtccaaacgcgtgctggactgagcaagctctcaccaatgtgggagggtccgtatcgagtgatcggcgtcccccggccgggctccgttcggctggccacgggcgacggcacagagctgcctaacccgtggaacatcgaacaccttcgtcgcttctacccctagtgggggtcgggtgtcaggtctcgggctcgggccaaccccgcacccccctcgggcgtgcagggttggccgggggctaccacatatgcatatacttatcttttttctcttccgtatttcaataaaagctttttcgatttcctaaggactgtgtctgtgccattgtttccttttgaagagttttggcttgaattagcacgctcgtgctcgaccctgccctcggtggcccgggccggcggaaatcgccaaacggggcccagaaccgagccgtgccccggggcgtggtgaactccgggggggaatcggcaaaggcccacaatcgggtccccataaccctcggtcaccgcgctcccggcctggccagtctcgacacgtgcatctccccaggcactagccccgacccgcgccgtttgaggctgggacctgggcacgagcccttgttcaagccaagacacggaaggaccgccgcacagaccatcctcgtctcatacacacaacaaataaaattgacacagaaatttcttctttatttgattgcagattaaattagtttatacaagaagggggcccgaaggcctcggaagaagaaaggaaaaactatttaagattggcgggggcctgggggctcacttcgaggctcccgggtcgccggcctcgtggtcgctgtcgtccacaccaccgtcgccgccctcctcgtcggagtcgagggcgaacgcgagccgaggggccgtaccctcgaagctgtggacgatgtggtcgacggcgtcccggacctgcgcgcgcgcgtcgtcctcggttccgggagggaactcgtccagcgctgcccacggggagaagtccgggtccctggcctggtagcttgccagtacaagctccactgccccccgggcgaggtctctcgaggatgacttgatcgtctcctcgagctcctcggggagccgctggagagtctcggccatctctgagaggcgctgggcgaggcccccctggttggcggcgtacttcgcggtccgctcgccccagaggcccgcttgccgcccggcgcggtctagacgggagacggcgtcccgaagcatgccgggccctacctcgcccgccaagcggagggcctcgacctccccggcggacgagtctagcgcgccctgcagatcggcgatggtgtgttccgcagctgcgaggcgggcggctagatcgccgtcgcccgcggccgccccgccgctgcgcgtcctcgcgtccagctccttcgcccgcgcctcgagctcagcggctcgctgatccagtgcggccctctcggcgcgtgcgccttccagattacggcgcgcctgctcctcccgcgctgcctcgcggagggacaggctgtccgccagccgctgcgccgcggcctcggcctcctcgagagctcgctcccgctcggtgagcgcatcctcgcggaggcggagtgcggactcctcttcggcgcaggcggcctcgtgcgccgccagcgttgcctcccggatagcgacggcagtctcgcggtccgccaggtccctctccctcgcgcgggcgcgctcttccagcgccatggcgcgagcctcaagggccacttcgcgccgccgggacgccgcctcgttctccgtcgcccgccgttcccgtgcagtggcggcgtcaaggactacccgggcggcgtcgagtttcttctctagctccgccacccggctcccgtattgaaggcggagatcgtcccgcgcctcgttgagcacggcggtggcgatgagggcagtctcccgctcctcctccacctccctggcgatctccgccagctccctccgacgggcctcgagctctgaggcgtgccggcggtatgccttgcggcccgcctccaccatggcctccaccgagcgccgcccctcttcgacgcgcgcccacaccgcgtcgagctccgcccgctctgcttgcaggacctccatctgggcacctaacccgtccagcaccgtcgtgttcgcggcggccagggcctgcaggaggggctctgtgtttagtggggcggcggaaggcagaggggagagccgcctcggtgtgggcgctgtgcggctcggcccgccaatcgacgtgccggactcaggggcgtcccccgaggctggctcgtcccgaacgtcgcccgaagggtcgggtccgagcggtgcgcccgcggcctcgtcgtgggtggcctcggaagtcgtcgtcgcctcgggcggagtcgggtcgggggcttggcaggccgcctggcgtgcgcgcgtcgcctctgcctcccgggctgacttcccggcccggtggagtctggcctcctcccgagcggcctcctcagcctggcgaacccggacggcttcctgggcagcctcctcagcttcccggaggcggtccgcggcttctcgccggacagcttcccgcctccgggcctccgcggtcgctgtctcctcggcctcagaccggccggacatggaatggcgaggggggcgtgacggaatctcgctgaaagcggaagaaaaaccagaagacaaaaagaaacgggtaagtgaaaactcgccttgggagaatgaatacggccgcagtgggcgcggggacgaacctgcgaggaggtcggctaaatgaccaccttgggggggagatgaggtttccccggcatggttcggtcccccccatcttgcggagccgcttcttttttcgctccccctcgggctgcgacgtcggcacagcaccctccgggcgcctgctgctggcacgcactgccccgccccctcggggaggagatggggagggggtatcctcctgtttcctcttcccccgggcgtcggcagggcggctgccccccgggcccccgtcacggggcccagaagcacgaccccctcccggggtagattgttcccctctgcggctcccgcccgcgccatcgtggcctcgaggagcccgctcccctgacgccccgaccgcctgcatgatggtcaggatgttggcgcgctctggatcgctgcagagggggaggacaccttgggggatgagggatgcctccacggagctgagattcagcacccgttgggaccaccatcttgaaatcctcaggggcccagtcccatctgcccccctggtgggtcctcatgtagtcctcggacccggtgtactcccaggcgcccctggcgcgccgctggagtggcgcgatccggcgacgaaggtagtcgccgaacaccatggcccccgtgagcccctgggatcgcagacccgccaggcggtcaagaatggcgtcgtagccatctcctagatctaccggcgcccgccagctggagacctgcgccgggggctggctcggaagtcggaggcgcgcttcgtcggcgagaggggtgtagaaccagtcgctcttccagtcgtcccacttcttgcgaaggacgcagggaatgtagcggttcaacaccggccctcgcggctggaagtagcagccaccgactaccgacggtggcgacaccggctgtacggtgaagaaccaccggaacagccggagagatgggcgcaccccgatgaacatctcgcataggtgcgataagatggccaacgtcattaccgcgttgggggtgaggtgcgccatctggagatcataaagctccagaacatccatgaagaaacaagagaatggcgggaccagccctgccattgcaaaagagaggaagaagacggaccaccccgggtaatgcggcgccgggcgtccctcgcccagcgcgaccacctcccggccagtggcagattccggcatgaatcggcgcggcagcccggcctgcctctcgctcacgatgcgggaaggcggcagcacgctaccctcgagcggtgcggagccccgtgccatgacgccggcggaggaggagcttgagagcgagcgagtatggcaagggtagggcgccggaaacggagagtcagagcacaagtggcaaaggcaaagggaagagtgacgagaggaaggaaacaaatcccttccttgatgtcttagtacccttgccaacgctatgcccagctcctcgatccccacgcccactacctcgccccctcgtctctcgcgcccacgcctccactaatcccgctcgcccgtttgcagcgcacgaggcggatgtgcggccgtggcagtcgagatgggacatatcgtgcgcgcgttaactacgctcgccgaccgatgcaccgtcatcacatctccaggcgaaacgaaccggcttgtctcggttcgcgcgctacttaagtaatgtagcggtcttgaaggaagccgctcattattgttggtcggttttttccttgacgatgtgcgcgatttgcgaccgctgggtttctgccgcctgtggagaccggccccacctgtcaccaggtctaaggagtggcgtcatgcccaagcgcttccctcggagaggggggggggggggcgatcgccctagcgtaacgccgggggctactgtcggtgacatgggaccgggggtatcttgactagaggtttggggcagctgcagtcacccacgtggcctggccctctcggggggggggagggtcgggaccgagggtgatgtggccgcccctccctctgtcttcccgaggggtcgggccgctcccgtttcggccccgagggctggggcgccccgaccccctgtgggtttggcgccacgtgtgtgggttaggtgagcacaacggcgctcacctaaccgcgtttattgcgggttggacgagcgccccacgccgcatttaatgcagcgcagcacactcgttcggtccgtgacaggtcacagtgtgtgaccggtcacagaccggtcagatcgcgggttaggtggcaacaggcggcctgacacacgcctcgccccgtcccgtcggaatgatgagagcctccaggcgctcgtccctagccggagccggcgtgggaactcctggagttggcacgtcagccccggccagatacattccaggcttcatcgcaaccattgcaaggaaatcattgtatgaagaagggcagacgtgtagcatgctgaactgacacgtggtggacaagaatgaccggtctgtgactggtctgacgccggtcgcgtcatcggcagacaaccgtgctcccacgatgcatctgcctccggtggagtggaggtaggtatgacccatctcgtcggatggtcatttggaaagcagccatggcaaatctccgcccattaatgagggagtaacagggagatccccggtgtcaggcgagagacggcgctgagcctcactcaaggacaagttgtgatttagcttccaggcgaaggtgcaagccaagttttggtcaagatagggtaggtccccacctagaagaaaagtaggtagaagtggtgcatgtagtatccccttgagatataaaaggaggaccttgcccaccaaaagaaaaagaaagaagaaaagaaaagggggggcgagaggggttctggagcctgaactctctggctctccggctctctgtagatcttttacacacagatccaccagaacacaggagtagggtattacgcttctcagcggcccgaacctgtctacatcacccgtgtctcgtgcacttgctctctcgcgaacattctccagatcgatcgagggcgaagaacctcacttagcgcccccggccgaaccggcaaaggggggcctgcgcagtctcccggtgaggagccccacgctccgtcagagccgattccattttcgtaggtcctgacgacaacaagcacgcgatgacagtggtactaacgtgaccagaactcgaaactctagatggactagacgctaagaccagcaacacgactaaccatgcaacagaaaactcaacaaagcaaaaactgaaaagaacaatacagaggcacaaatatggctaggtgaaggatgcaactttttgtttagctttttctggtgataggttgataaaaactcaccaagcaacgaatgctctaataccacctgatgaaccctgaattccactcgaaactcaaggctgttcttggcccgatctttcagtgagttcagataactacgatttaggagaaacgttgatgacccgactacaaccgtacgagacgttgtgttgcacctttgcgatcgatacacctctccatggattgttgatcttgccggtgcagatcaatcttattcctgcaagcaaatcgaagaaacaagcatgaacaagataaaagcaatctgaattgcaaataggaatgaatacatatgataagttcgggtttcgaatacaagaagacgatgatctagccgacacacgcgctgcaaggaaatagcaatggctaaactttcatctaaacaaaacccaagaaaccttgaaggggtacctatctatttataacggtgggagggcaacctaggagtccctagggtcgtgctccacgtagttggggcgcaccccacatgggccggggtcccaaacgaagttacaagcccactggcccaatataggtgacgcaataccttgtttctgcaattgcggccctctgggaagtaatttcgcaatgaggctggatccgttggaaagaggactctaagagctttctatcaagtactgacggtcctaaaacgaagttcgtatagagatttggcggccgtttgaattcagcaatgtcaacggtggccgaatcagattccaacacttggtcaacttgattttcatgtgagcgacgattgtatcaatagtagtcatggtcacatcatttaatgttgtctagatcgaggtgattggtgactccattaacaccgcaaatatttagatgagcctcgtgttagggtaaaaagacactaacatgaattgacgactccactggggacgataaattttggctttgcaattaggccgacattaacctcggcatctgctgccgctgctgcttctttgcggcaaaactgacctgcaccgtgtctaattttcgtcaattaaggaaactaataagagcattactttccaatctagccaatcaaagacgcatatatcttgcctttagttgttgccgttcgatcgtcatcgattacaccaatctagccaatcaaagacacatatatcctgccattggttgttgccattcgatcgtcgtcaattacataggtgggccaaaatcgggccaaacagtattgttcggtcacgaccgcttcgggcaagggctataacactgtcgcagtaaggcaccgtttggtatagctccagcttctatctctcaactccaaactctaactccaatggaagccagctcctctaaaagatgtaggtgctctgaaagtatttggctaacttactcagctctagaaatcctgcaagagacaatactacccttctgtttttttcactgttaactttatgtaggattaataatagatactttccttaataatttcagcactgtgattattattatttttccttaataatttcaacatgttaagtatataaggtgataaacataattcaaaaattggtactaaaaaaaagtataagttcaagttgttgcatgacatatatttagcaatataaatgtttagtaaaaataaatagtatcatcgaaagatagagcaaaatactacaaaactacacaaaatatgatatatttccgtcaacctacaatacgaccggctaggtcatctcgaaatgcatccatggattatcactttgacccctcagtggatgtattcgatgcatcttgagaaatcacatatctccaaaatatagatggaatggttggcacataatctggattcctctcaaacctatggaaatgcctattaggcgtgtcatggtcatgaatgaaattatgcaatgccattgttgccgccacaaccatcttttgtttccacattggaaagctcagcatttagtagatttcctcagataaataatcctaactaagtggaagaaaagatagagagaactcatttcctatacttctaatatacactaaactttactctacacttgctagtatacaatcatgtggccaataccacctaacagtgccatcctggtgctttgagagaccaccccgagttaccgagtttcttacgacgacaacctgtcatggccgtccaaccggggttaaatacggaggagtaccctccccaggaatttgtcttaggaatatatactaacatggaggaatacccgtactgagctgtcaccatcagcggcccacctctactgtcccgcagcatatatgcccaaatgatgatacttactaatctaagcaccatgcttacattaataaatactattctacatctatgcagatgatatagagcaatcgataaatcggacaataaacccacaccattgcacctcgctggtaggctacccactcatttataccaacacaagtataaagtaaaagcaatactcatactaagtaaagtaccgagaatataaaaagaagagtatttcattaattcggaaagtattacaggagaggatagaaaagctactagagccataccgaaactcctccgaaagctccgaggaatccagagaactactctatactacttccacttagcactaaactactaaataaagtatgaagatgaatgttgagcttgcttgagtgtgttgtgaagtgaagtgagctcctccttttatagggtcggtatgacggttactctgatgcgcaatgtcaattttacccctgtaaccgtcatcagcagctcatcctggacatcctcatgtaaaggccagctggagccacagttgctagggttcggctgaacctgggccagcccagcaggcctccaagtttgccagggtgactgacaggtgggtcccaatgacagttgtggcagttaagacggtttccagcggttacacctatcatgtgggccctccttatctatttgcttgcttaggagtgaggtttcttcacattctctttattttatttgctaaattcctgcaacatattattctccaagtacaattggtactatattattctgaaataaatatacattgcaagcatagctaattctctattattttagttaattgacggtcaaaatttgtctgtaacgaccgtcaagacctgaagcatcggcattggtttctatctgatgaggctaattagttagcgcgtgcggttactaggaagatggacatatatttttcctagtttatcaatttgtttccttttcggctgaaccttgatatttttgtgtttgaccatgtcacctgtatatatacacgggtgtacggtcagaagaaaccccgaacaaaattataaatctactattttccccttttttactttcttgttgttttctattttgttttcagggctgagttctagcaaccctataatttggttaatctttgccgttttgcgctgaaaaacagtcctgcttttccacgaaagcgagaagattatcctttggtagtttgcttggaaactagtcgttcatcatcacgtaagtacgatatttatcttctttgctaattttcttgtaaattagtcgtgtgattccgagaaagtgaattaatcttgaaatcggctgctagccagttttaatctatcgattttggcgactctgttgattacatcgcaaatcgttaggtgatctcgtgtggaccacgaaaaagtgtcagcacgatccaagtcttttcaactgttcttatctgggccaacggaaggtcggggtcatttagtgggccgtgtgtcctaatgatgggctgatgcttgctatttggtatatcatatgccccagctcgttaagctcacgagcagctcgcgagccagctcgagctgactcgttatagctaacgagctaaaacggtagctcggctcgttaggaaaacgtaacgagctgagtcgagtctattgacgaaaaaatcgaacacaccagcctgggagatctgcttagctcctgtgcaggtccaaatcttgatgagatgcgggcgtgccagtcagtttgatcttgcaaatgacaagatatgcaaatagtaaatcaatgcagccgatcggctgacaagccgatggagtagttccagccgatagccgataatagccgatgccgataccagccgatagcgatagggtttaagcaatcggctatatgtccaatatagataatgatataaaggcaatcggctattgatgatgtaataacataacaatataaccgagtagaaaccaatcggctagaaacaagatataataagcactgatccgaaggttaaagcatacatcggctggaggtccgatgccattaaattcacaggattagataaacagtaaaatctatgttgcgatcggctaattccaatatgtatacaatccttgtaagccgatgcaacgtctagataactcatcggctgaaaccccgatgaaacccttattggcagtcaaaagcagaccagagattatggttctaagcacaacttagtagatcaaacttaactgatgcaacactaagtatgaaaagaaacacaatatctagacaatcaagccgttgactgatttttagggtggtagatgcctaggctaatctaatctagcaaggcgatttagctgataccagtagaaaccctaaagcgagagacagctgatagagctaaattgagatgctaggactagattaacatagacttatgataaataggtaggcaaatatatcatccaaaccagagcaatccaagaggtcgaatgtactgatgcagccttgaacgacgctgatgtagacgatacaattgcttggaccggcggaacattggacttatcccttcgccggagatcgaagacgatgcaaccccgcgtcggatgccaagttccgccggaacgtaaaaacaaaagtagaagtaaaaggggtggcgatgcatcgaattgtattgatcgtagcgatagattacatagaccccgagtgtacatatttatacccatgggttgatacaagtccttgtcggacaagaaagaaacttttctaaagataaaaggaaaagaaaaagtccttataggacactaaacacactttcctaaagataaaaggaaactaacaaactattcctaattaatagataacttgccatgccgcattctctttgaactcggtctcttctggataagcttcctttagtagatcaatttccttaaccgaatatagcaagaatccgacaactgacgacttgataactctcatcggctaatctcaggacttcaaagccgatgctggctctaagccaatgactagtccgggcttaccaaatttcactgttaacagagtcatgccaagctagtgacgagatgagcgagctaatgagtcacgagctttttgtctagccctaattatgagtaatgactttataaaatattaacaaagcaactgagaaataaattaatgatagatcaatatatgtataacctatgaagataagttgagatttagtagcactcgaagagttgatgtcttgttccaacttaaattaaaagcagacatgatgttctagtcattggatgttacatcatataatgttttggcagaaaatcaactaacaaaataggctcatgctataacagcctgctaaattgaactgcagatgcgatagcaaccggctaagttaaaatagcagtcgctaaggctgtgttctttcctaggtgatctgggtgattgttagtgagttttgcttcgttttccgcgcgcacgcttcccgaaatactaaacggtgtattttttgcaaaaaaattctatagaaaagatgctttaaaaaaatcatattaatctatttttgaagtttaaaatacttaatagtcaattaatcatgtgctaatggctcacctcgttttgcgtatcttcccaatcttctctatctcctcttcttaaacacagcctaagtctacatccaggctgctatcttgtagcggtacagctctatcacttggtacagctctagcacatgctataaacactatttattacatccaaatatttactccctccgtcccctaatataagggattttgatattttgcttgcactgtttgaccattcgtcttattcaaaaaaaatttaaaattattatttattttatttataacttactttattatctaaagttctttaagcacaaatttttgttttttatatttgcataaattttttgaataagacgagtggtcaaataatgtaagcaaaatatcaaaatctcttatattaagtgacagagggagtattaatattcaagatgaaaggaaaggcacgttaacaactacaactagccaactcgctcgtggaaggacttacgtgatgaataaaatcaactagctcgaggcgagtgatttctttaagaagaaaaaaaccaagtgttcagttaataaaagagtaaatttcataaaactacacattttatgatccaagttgtagaaaaccacatacactttaacacttagcacttaagtacatatattttggtagtgtagtttcacaaaaccacactatcaatgaatggattcacccgcgggatgacgtggctgtttcacataggacgaggacgtgtgatcctattatcagccatcgcacgaaattaataggatatgccacgtcatcatcctagatggaacaatcacgtcatcacacgggtaaatccattattcgatagtgtggttttgtgaaactaaactaccaaaatatatatgtacttaagtgtcaagtgtgaaaatatgtatggttttctacaacttgaatcataaaacatgtaggtcagttagtactggcacttttataggaacggtaccagatactcatctcgtaagaagactcatccttgtatttcaagcaaatatccagtatctttgtaccataaccacaatcaatcacaatcatagaatgtttcattgaagaatactgaatctggttatcattcgggactcttaggtactattgcacctagtatatcgattttttcttcatcttactatttactaatcatcttaaaaaaacatttggtgcacaaatttttagaatctggtactaacaggtataatcaccccaagtaaattccttctatatccttgaaaactcactcaatccgtctcatacccgtgaaatttaaccgatcccttctatacccccgaaatttcaatttgatccattccatgcccctgccgttacattttccttcatttcactatttgattacaaatgtctttaatgcccttgatgatgtaaatttcaatataggcttggaaaactaaaaaaaattctttgggtgcacagtatgtgcattttatgaaactaataagattaaataattaataaaaaaatttaacataatttttttaaataaaccaaatgcaataaattaaaataatgtgttgcacaggaaatcataaatataatagtctcatgcgaaaaaattttatattttcaataatgtaattcataaatttctttgttcacccaagtgtaagggtagaatggtcatttttatacaaattagacagttaactgatggatggagtatggaatggataagttgaaatttcatgagtatagaaggaatcgggtaaattttaaaggtatgagagatattgtgtgagctttcaaggtataaggataatttacttatttattggacatgactacacaatgcacggtcgctggtttatccaaaccagcgaccagtttatcccatgtgacatataaatcctcctttaccatctaaaaatggcaacaaccatttatatagattggtcactagcgtatctttcttttaaacctcttcgatgacttatatcttttaaaccgtatattatttttaagatctttttgcaccattgtactccgctcaaaatatgtgatgaaacgaattcattgttgaatatatttaaaatttttattaatctaaaagtaatttatttaaattgcaaaagtagctatgcaatagatgtaactctttatagcattagaagtagttacattatgagtgaattgaaataagaaagctatgtggagtaaatcgacaggaaaagcaaagtgtagagaagattttcaagtaaatacatatattctttatttaaagtaatcactatgttttttaaataaaatattgcgtcatatagaaagtaactctttgcgatattaaaagtaactccattactggagcaaagtaacttttaaagaaatataagtaactcttcgtaatattagaagtaaataaaatcctatagacaagtaactatgaaaaaaatagaaataactcttaaaggtattagaagtgactgtacagctaaggagaattaactcgtcacggcattagtagtaactacacttctataagtaactacacttctggaggagttgagaaaaaatataatttgaatatattcaatatttgactcattttgtcacatattttaagtagagtctgacggttcaaatggatcttaaaaataatatacgtctaaaatatataggtcatcaaagattctatagaaaagaaaatatactagtgttgttagcctcagtaacatgcacatgaatcgagatgacaactagcaaatcatgtggtcctcttttcctgggcaagggcaagtggtatcgtttctctgtatcttggtaagtacaatatccacgttttcgtatctcagtcatcatcaactgattggtcaggataactacttccaatgctacataggataactacttccaatgctacataggtagttacttctattgcagagctaagttacttctacgatttaagcaaattacttttagattaagttaattactttaaatgtttgaatatattcaatattggactcgttttatcgtgtattttgagtacagcttgatggtaaaaaggaaagtgagaaataatatatctctactattataaaaattaaagatgtttttgctggtattttggtacgtcatcagtgtatgattcagtttttaagttcgtttgcttttggaaatacatatccgtatttgagataggttttaagttcgtctgcttttaaaaatacatgagtcgtataagaaatctcttttaaaaaaactcgcctgctaacttgagatgatcggattcctaaatgatttttcaaaaaaatatatatccaagcgaattctcacaataaatttcgtatctctactattataaaaattgaaaatatttttaccggtattttggtacgttatctgtgtatgagtcggtttttaagttcgtttacttttgaaaatgcatatccatatttgagtcggttttaagatcgttcacatttggtaatacagaaggaaccatataagaaatttatttaaaaaagctcgcatgctaacttaagatgatcggactcctaactgcatctcatgattttctaaaaatatatatatccaagcgacctcccacgatgaatttcatcttaactaaaccatataaaaataataagattaaaataaacttcacccgttgtaacgcacgggtattttttctagtggtttaaaatatataagtcatcaattctattgcttaaaaaaagaataggccagtgaaaccaaaatctttagttttgatggttggtggtgtgcaggtttctcgctttaatgccattgctgtagagtcaagcctgttgctcccatagaacgaagacatggatggatggctgtcgaacacgtcgtatgataacacaaaaccgggagcgctctcgattttcatttcccgttatttattaccttgttgcaactagtgagatgatttaggtcatgtttgttttagcttagaattattttaatttggttaattactaatctgaaacaaacagacagattattatgatatattattataatctataagtaagaataatataatctggtaatatcctctaaacttgttttttaaggattattgggtggctaaagacccactacttttataaattgtatgtaaattacctaccactgccatcaaacccaacagatccagcgcatctccttcctcactccctagccgcgcgtgaatccggcgcctcccctgatcgcgcgtgcatccgcttcctctctcccaggtcgtacgtgaatccagcgcctcccccggcagcgcgtgcattcgcttcctctctccctagccgcacgcaaacccttccccaagcccacaccctataccccggatccttccccaagccgccaccgccgtcttatcctcctcccattctacaataactgggccattataaacattagcttttcaaaccgaataatccatactctaataatcgagagaaaaaaacaactaatagcttattctactatagcttattataatccagtttaagtaatctaaatcaataatccttacttgcaacaaacagggccttagtcttgtgctgcggttgtcttatctggtacctgcggcttgacagggtccttttgtctactctctccgtttcaggttacaagacgttttgactttcgccaaagtcaaactactctatgtttgactaactctatagaaaaaaatattaatattcacaacaccagcatagtttcattaaatctataattgaataaatttttataatataataatcttggttaaaaatattactatttttttctataaaattagtcaaacttagaatagcttgaccttgaataaagtcaaaacgttttatatcctgaaatagaaggagtagatgactccttgcccttgggcctaacatatacgctggtcgcggggaacttgagctacggcctactatgggccaggaaacagctcaagtctgctgtgctggataaaccatgtactatagaaattatagtcctctgggctatagcccaatcaggtctggttctgcccctgaaaataaaatagcccaaccactagtgttctgtaattgccatgggagcgttcaacattgagtgcacttccccacctttaaagttggaaaaagtacgaattacccttcaaattatcgcggtcgaccgaattatccctaaacctgaaaaccagacatcgctcacctaaactttcaataccggacgaattaccccccctcaactcaatacatggcagttttatcctacgtggcggcgtatgcgtggcactctagttagcatttttttaatggtggggcccacttactctctcccctcctatttctcctcttcctcctctctctctcactcaagcgagtggaggcggctgcgggcgtggctaggcgagcggaggcgggcgcggctaggcttcgtcacccactgcagctggaactcgatgctggagtccatcgcccatggcgtgctggtcgtgacgtggccacacttctccgaccagttcctgaacgagcggttcgccgtcgacgtgctcggcgtcggcgtgatgacgcctgtgctgttgttcggcgacgaggccatggcggtcacccggggtgacgtcgcgtgggtggtgatacaactgatggacggcggcgagaggaggaggaaggcgaaggagtacggggagaaagcttgcagagccatggagaaaggaggctcctcgtatgaaagcctgacgcagctgatacacagcttcaccctgcaaggagccaaaaacgctgtagaacagtagaatagtggaggtgcaaacaaaagcacatttgaatccaaaagttgcactgtttgctgaatgtttttccattttattggcttcagatttgcactgatttacttcttcaaatcacctgtgtttcgtattctgaagaagttaatggataatgtaattctagtagtgaacagactttcttcataatgtggactgagaatcggaggcggctgcagcggcggcggcgggcgcggctgggcgacgtggcggagctggagagcgcgctggaggtggtcgagacggtgtccgcgagggcgcgcatggagctggagctcgaccacgcaaggaggtggacgacgacgctgccaacgctgcctcgcgccccgccgtgcccatggtgcccgtggcacgcgtagagctggagcacgacggcgcgtggagctggagctgctcccagtggtgagcgagggcgatggcgcccgccgcccgcagtggctttctggccgccggccgccggacgccgcccgactctccaccacgcccactgcgcccccgccacgcccatcgccggccaccaactcgcggctccacatatgagacagagagattgagaggaagagagagagaggtgggagagtatgaaaggtgggccccaccatttttaaaaaaaatgctgactacattgccacgtaggacaataccgctttggattgggtcgagggggttattcgtccggtatagatagttcagggtataaaatgtccggttttatggttcagaggggtaattcatactatcgtcatagttcgaagggtaattcgtactttttcctttatagaaaggaagaaaaaaagagaaagaaagaaaggaaaggaaagggtgccctttgccatcgatgctacagtagttatgtagtgacaaagagtgtacatcatccgtttcaaattactttatcgttttagttttgtttgaactcaaacattattaactttatacatatagtttaattacatgtgaattacatattatgaaagtttttctcatggtgaatttaaaaacacaaatattatgatgtgaaaatatataaaatttaagaaattgagggtccaagttaaaaatgtttgactaaaacaaagctaaaatgacgagtaacttaaaaagaatatgcaaagtcaaattcaccttctataagttaattaaaaaaacaaattatactcaaactagcatgtgcattcatgcttatatttattatcttttataatttatagagtcaaatttgaatttgcattttcatggagtagtaccgttttattttttaacatttttataattatttacataatatataagaaataaggtgagccgttgattgccaatcagggaatgaaaatacattccttacatactaattctgcctaaaataagttaatctagtactagttatatgttatatatatcccgtactagattaatgggatagaggtaatactgtgcttgcacctgtggcattgggacaacgttgagatttgagaaacatccaatctacctgttccaactctaaagtgcaaccgaattgaacgagttcagccgcatggcaccacacgtccacaccagcgaagttcgacgcggacaaacattacctgaggtgacattgcaacgcatatggaccggctatacggctcctcaatcgtctgccccgagagacgaaatcgagggtgcaaatttaattcacggagaaatgttaattagttatcccacaggcctaatcctgctaatcccttggatgcatgcaagaacgcatgatgagaacagcaccacctcgatcgacagaggacccaaccaccgccgcaccgcccggttcacgctgtcccgatgttcccatgtgccaaccttttccatcttggctaggaggcaaagcaactttccttccttcttccgcgctgttcgccagctagtaagtgcaagtacaaaggtagagatcggtatggtttctacattaattaaaggctatcacgttataatagttaagacaatacggtctctaaccattaatataccaaaatactccactttcttactagtcatctttcctttactagactcaatgcaacaaaaaatttcctaataaatgctaagagtcaactctatgctgttgtcatgcgtagcaaccatatttctctttctttctttttctctctttcacgtcaccaaatattcttgcatgacaataaaaagtaaccgctaataaagaccattgtacatgccctaacatcagcattgtgacttcgatcttagacatgagtccatgccacattgatcatcagctaaataaccagcctaacaaattacatttatgtattacagatctactaaagttaggcaggacgtatatatatatatatatatatatatatatatatatatatatatatatatatatatatatatatatttatttatttatttatttatttatatatatttatattaccaaacgatcctgtgatgagaactgaaatatgaccagtctgcctacttgatttgtgaagcaacgtatacgtaaacaaagagagcaaaagccaagaaaagagtcaaacaaaatcaggtttgcatgcagtgcctttttctatcatcctcctcccgtcaaacatgggaccgtgtaggcccgttgcccagatcggaacacaccgacaaaacacacgctgacatttttgtctgtttcatctccgattaatttcttgtagcgctggcaaccgtctcttccggcaaacctttgcgtcggtaacatctactccctccgtttcacaaatcattctaacatttctcacattttatattgatgttaatgaatgtagaaaatactaaaatgacctacattatgaaacggaggaagtagctcagctttgacgcaaatacagtgtcctcaaccccccaacccaacaataaaattacgccaatgcagtggtatagcttatttattttatactgtcacacgaccactacaattttaatgattccttctgaaccatcagcaccagacaacgcgataatttatttaatataacagaaaaaaactacaacgctaaaaccccgaaagtcaatagccagaaaaaaaaaccaccgccacacaacaacaacacttacacaaagccaagaaaaaaaaggctagcaccgaatcggtcatataggggtggcaccaccaccacacaacaacaccacctacacagagccaagaagaggccagcaccaaatccaccacataggggtggcagcggggcggggttgggttggacaagaatgcccccggccagccaccgctccttgctttttccctttttccctgtccacggccccgcattggccaccgggtggaaaacctcacttgccctcacccccacagaggacccaacgggtgagcggggtcctccactacccgaatggatagcaactgcagggcacctattgtggcagcaagaggcggcgcaccgcaacgtggtgacggttgggggcggcgacaaggtgtctacggctgaggacggtggtgatgaggcagcaccgtccaggggtggcaacgaagaggctacatcgggtagggctagcgcgctgtgaggaggcgagaccagctaggggcggtggactgtgaggaagcggtggcggttgggggcgacgcgctgcagtgaggcggcatcgcttgagggcggcggcgaaaacgagacgccagctgggcatggcagcaaagatgcaccaccgtctagcagcgccggctcggggtggtgacagctggggatagcgcacaaagaggtaggttggctggggggtgctaggttggagagacgtgggactcagacaggagagagggcggctaggtatggatttgggaaaaattaaggtttcgcttatatagtccttcacttaatgggtcaaatgggtcttttaacttataactaataccttcagggccccatgggtcacccgcggtcaactcccatccctgccctcaccccgctcacccacgcatgagaattttccccaaatcccggccctaatggggaaattgccacctctacggtcaccgctaaatatgactggctactactagaccaacaaaggaagttacaaccgaaaccgcccaaaaccaagccctgacagtcgatcattgatctcaactctggccacccctttgggattgaggggaagagggtgagagagaagaatgaaactgctttcccccctaaagcccgcttgtttgattggcccacagttggttacaagggtgtcctaagaggcattaagcggatcggcgatctccactgatagggccctaacttcatcctgccccggggctatttccttcatcttcattcaaaaattatttgacgtcaaaggaaaacatgttggacaggtcctgtaggaagggatggattaggcacggataaagattagccgatgatcaagcttagaagtggggaagcagcttagccttagccttagaggaagtagacgcaatttcctcggtaacggcttcgacagacggagcagctcgagccgatggggacagctcttgcgctgctgaggccgataggtctatcaacgatgacgctttcacctacaaaagggaaagagacggattacaaaaaggccatgagggagataaacgtttttttgcgaatatgcaatgcaaccttgcgaatggcgtaatgaactctggttggtggagacaacgagagagaaggcggaatattgtcaactaacgcttcggcacttatcccagcaaaaccatcagccttggccctcttgggtgatgacccggtaattcctgaagagggatccttgtgtttgccaaaatctaggcgatcggtagccaaaaccccagtaggagtcttcatgaatgtttcaattgacggagcagaagaaatgatcggggagggcaatatcttggtagtccctctggaatgcttgagaacctgggcatagcaaattggccgatcactcaggctgtgtttcggtgccagtggttttaagatctgcagagagaaaaaagggagcaaaacaagttaggtcgtggggaggggggcataatctagttagaagtaaattgcggcctaccttgatgcggttatcaatcttggtaagacaatagtcggatggagcagagaagagatgttttgaccaatccgactatcaactgtagaaggtgacatgcttaaactgataaagggtgaagtcgccgatatcggctgagactgggaatttgcattctaacaatttcttcatggtatcgactgatgatacttcacatcttgagtctacaacttttagtaagggaagattgatgggaagctggccaagccccagttgtcttgcagccgatgttgggtgataaaactcataagagaaagattttcttccctgagacacatctgtaggaagaacgcaaggagagattgctgccaagtaattgcccctcaataacaggtcttcttcatcatttagcttgctcagatctaaatccattggaagatcaaactcggtgtaggcgtcataggcaaagagaacatcggcagcatcgttgttgtaaaatatgtcgaaccatgtcttaaagccttcaatagatggcttgacaccagggtaaactaaagctgcttccccataagacttgcacggctgggaatctgattgatcatcaatggagtcatatgtggggaaggccgattcaagcagagaaggtctgttggccacggtgttggtgtgaattgtcaaccacagctgaatgaaccaaccaccaagggcccccgtaactgaccggcttgtctataagaatattggctaaggaaacatgtaacatccaataagctgcccctaggaggtatcggccaagaggaactttttcctttctcaccagggcttcagcaaaatgaaggaagttcgcagtcagtgctcaagtagacccacagaaagcaaacctctcgagccatagggagaggaaggcagcatgttcctcatccgaaattggaccagttttccgatggtcgacgatgaagcctcaccagccattgttcttcttcttcgtgttcagttgataagagcatttaatgtccacgtcaaaaggattaatggatgaaaggatgtctaggcctattaacatcttcacatcaagcaaagtgggagccataggtccctgcctcaagatgaaagcattcagtgtatcagaccagaagtagccgatagcagaaagtaggggctcatcctttttcaggtttgctatagataaagccaggcattgcgctattcctacttcctcccaatgagatcgcttagcagccaccatcctcttgtaccatgacttgtaccctttcaacctagacagccaagacctgaaagtcgatttccattgagctaagtctagtttgatctacttgaaagggatcctctctgtttcacattgataaactcggtgggatccggatcacccatcggcccaaggaaaaagcatgtggagttctgggaggtgggaatcaaaagatgatccctagaatgctggcagaagggaagaaggaatcggatcaccaaagagccaaagatgactgagggaattgctaaaaagtaacaaggagcttacctcggggatctcagccacgtgcactatcgccataggtccgaacaaagttgacggagcggaggagtttgccgattgaggggcgatcgctggaaagatcgccaagagattagggattgctacagtagaggctgcgtggggaataatgagcgaaagtggtaaaaacggaagcgatacggtgtaagtgggatccgaggatggtgatcactattttaaaagggtgcggtaatggccgaaatggaaaatgaaccctagataccagtggaaacaggatcgatcaaatccgcaacatcccaaatatcgcggacttggggagcatgtgttaacggctaaaattggtaaatcgtatattggatccgaagtcagaaccgaggcggatttggaggaaatcaataatcatggaaacagaacccgcatcagctatgggttgcatcggctgtcgtctgcatcggctggtactgaacctgatagggagaagccaatgtagccaatcccggcaagacaatcatgggatcgttgtcaggatctgttgaggtgctacacaagtattgccaaatgtggatggagctcggagaagacaattgtatctattaattaggatattttcatagtttccttatagatattttcggtaagagtccacctaagggacttgttcatatttttgagttgtaatagagatagagtcgtgtctggcaaagacatatcatgtattttgggtataaatatgacccgagaccatgtaaacaaacaacatcaagttcaatacactctcggcgcatcgccacccttttttccttttctttgttttcaacgagttcttgctttcgagttgggctgcatcggttttgatcttcgatgaagaggtaaagcttgttacggcggcttgcgttctcggggctagtgcttatatcttcatgacactctagccctgtctatacaaaccgctgagttatcatatatgctatataatctagatcgatcttgctatattaccgtgtcggctagtctctatcatcgaaaatagccgatagggctagatagctgtgtcggattagattatatagcatatctaccatctcgaaaaggctttcttagacttgtttagatcctatgtttctccatgtgcttaatgttgcatcagtttagtttgatctgttaagtagcatgttctatggttgttaatagagatagcatcggggttttagccggtcttacctgacttagttatctcgtttcatatatgtttacttgatatgctaagcctgccctttactttaagatctcgtttggaccaaatatactaagcttgccatcagtctgtcaggttaccctgacactagattgattcctgtttagcatatttgatctataccgaaatcttggtataaagtggtatcggattactagccgatacacgttgggtttgcctgtcagctatgctgtgagcgtatataatccctgccttaaagtgttcatggactcaagtggtttatactatctcggcgcgctgaccgatctatcctaatcacttggttcaagagtacttcaaagcatagattatatattattgacatctacagccgacagagcacgtccaattatcccttctccatatactacatggccggtatgatctgtatcgcatcagcccggtataaacgacacgccatcggcaacccagccgatcggttatcgtttacggatttaactttgttttctttgtttcttgttggttgttttctttgtttcttgttggttgcaggatcaaaccaactggcacaccctgaacccgaaagcgatctctttggacctacactagagtaaagcaagtctctcaggccagcgcgtgttttccacgttgacactcgttggcgtgcggctagggaggagatcgagtaggatttcttcaggagtcgtagcagagatttcgagctcttggcggttagaggtgttaccaggcactacgatgtggctcccggagatggggtgcatcggggttggggtcaggcaagcagcatggagggcaacgtggagtttgttagagtttatgttgaatatgtgtacaatgtcgattacagtttaggaattggagttgtaataggtattagaaatagagtgagagtcggactttatcataggatctctcttaaatagagggacgaacctgttgtaaccgcatatggtgacttagcacagcgagatggtgtggctgccggcgacgtccgggcgtgagtcattgtaactctgatacattgtagtatgctggatcgcagatgagcacccacaatcagtgtcccgggtatgtaggcttcagctgaacctcgttaacaaatatcgtgcctcgtgtcatcatcgtgtttggatctcctatggcgtttcttccgcgtttggttgttgatggtgatttcaggccagttttataacatcctcgccttcactgtcgagattcagccgaattcggcgaggtagaggaagcgggtgaagggaggtcccattgcctctgccgccgtagtcaagttgctgcaccgatgtcgtcgagccgtcgtcgctgcctcccaaggccagatccggcgagccccaggttggatctggcgagcttagtggagtggagtcgcagccatcgccgccgtccgaggccagactcgacgaaccacgggctagatctggcaaggatgaggcggcgctagcattccgacgaggaaggtggagggagagcggtggaagggaagagggagggttgcaccaacggtgggaggagaacggcggaggaggaaagggagagttgtgctggtggtaggaggagagcggcggagggggagagagagagctacgtgccgacatttggagaaagcgtgacggggatgaccggacgaggatgggagggtgtatttatatttctttttctaattttcgggatgtttgatgtaaaatatgaggactaaaataggaaataatatgggttgacatgcaaaaactgaaacagctttagaactactgaacactatgaaaaaaactgatttgagacctatgactttatcatacatgatatcatgatactcctgtagtaatgtcttgccttatcaatggatgtcctctcagctgctttccggtctcctgcaacgagagtgttcacactgattaaggctattattttggagctcccctatatacggatggattaacatgtgataaattaagtattagctaacaaaacttaaaaatatattaatataatttttaagcaattttttataggaatttattttagaaaaatagcttgggaagtgtgcgctaaaaatgcaagaggtgagttggaaaaaagttatgtaaaactgagcctaagccgccgtttgtttggaacgggtaaactatgcaagaataaaaccccacctcccatcatcactgttttaacccaaagtgccaaacacatactgagagaccgctagtgctgggactgggaggagagcgcagaggaagaggaatactggaaagctgacgaaagaggcaaggaaaggaaggaagctagcacgcacatatccagccagcccaggattgcagattgctatccctcttattctcgcaaccacgctgatcccaaaccccattccgcctctctcggccggtctctcctcgcgggataggagaaagtcagcggcgggcgcgaggtcggtcgagtggagcggccggcaagaagagcgaggagatttaggagggggagatgaagcccgtcgagcgcgccaagctggtgcggagcctccggcaggagtcgcggcggctgcgcctgctcgtcctcgtcatcggcttcttcctcgtcacactcaccttcgtcgtcatctccaagcccgacgccctcctcttcaaccgtacgccatgccgtcgccgcttcttcatcatcttcttcttctttttcttcttggatccttggatcgatggtaacaccaagcgcctcactcgtttctttgagttcgcagtgaacggccggctgtcggtggatcatgcgccgcgctcgctcctgatccgccagcggatccacgccgactccaggagatccgccgataccttccccgccgccgaggatcccaaggtggtggacgaagacgaaggcgccgaggacgccaccgccaaaggtgaaaagctccagagctaattgccgccttgctgcagtcagcaaatcttgggcctagcgtactgaccttttcgttatatatgatgatagggactagtgaggaggagaagaggctactcagtagtgagcccgagcaaggcaagaacgaggaggcggccactgcatctgaggtgttaggtgagccgtcaccttccaatccgtcaataatttccttgtctagctctgtctctggatgctttgattcacggggtcttgagaggtcaagagagatttgggcgccatcaattgatgcttgctttatgtatgagtactttggtggtgggatgtgcaggtggtggaggcgaagaggataataagaacggcgaggaagaggggcacacacagcatagcaaggtgaccctcccgactgtttccaattataccatccgtgatgctgaagacactgacaatggcaagcaagaaggtagtagatgctgtttcttcttgtgtttcttggactttacttgtagtactagctgttttggtacttgttaagctggtgcttacaagttcttggtgggtatgatggccctactttgtctgcagatggcaaaccgaatgaaaaatatgaatttgagatggacgcggacaagggagacaatgtggaaccaggttaggattttagatttcaataaatgccgacaggaaaatggaccatctgaatttagtgattttggccatagatgcaaaaccctattttggtatcctagaccaatggcatcatacacttcagattcctaactactagattgaaccttaaattagactgattatgcttcattcagtcttttgtttctgctctttcattgatgatactctattgcagaaactgataatgaggagtggaacaagaaaccactatgtgatttctcaaacttcagagcaaatgtctgtgagatgcggggcaacattaggattcatcccaatgcaagttctgtcatgtacatggaacctgccagttcaaagagagaggagatatggaaagttaagccttaccctcgtaaaggtgacgagctctgcctcggccatattacagagataaccgtgaaatcaagcaaagtggcacctgagtgtagcaagtatcacaatgtgcctgcagtggtctttgctctgactggatacactggaaatctattccatgacttcaccgacgtgcttgtccctcttttcacaaccgcaagcgaattcaatggcgaagttcaattcctaatcacagacatggctatttggtggacaaggaagtataaggtggtgtttgataagctatccaagtaccccttgattgacttcaacaatgacgatcaagtgcattgcttcaagcatgcaattgttggccttcatgcttacatggagttcacaattgactcatcaaaagctccacataactactcaatggtggattttaataggttcatgcgcaggacctactcactgcctagggattttgtaactgcgcttggtgagattcccaaagccaagccaagactgctcattatatccaggcagaggacaagaatgtttctcaatcttaacgagatagtggcgatggctgaggagataggttacgaggtggtggttgaagaggccaatgtgagctctgatctctcccattttggcaaggttgtcaactctgttgatgtgatgatgggtgtccatggtgctggactcaccaactgtgtgttcttgccacaaaacgctacattgattcagattgtgccatggggtggactagactggatatcaagaattgatttcggcaacccagcggaacaaatgggcctgcgttacaagcagtatagcattggtgtacatgaaagcagccttactgatcaatatcccctagatcatgagatcttcacaaatcctctttcgttccacaaacatggatttgaattcatcaggcagaccttcatggataagcaaaacgtcaagcttgattgcaaccgattcaagcctgtactcttggaggttcttgatcaattgaatcaatagaaaccactaatatattgcaagctggggcactgtttttgtccacaaatttttggtttcaccgttctttatttagtaaaatttgttggccatcttctgattacatgagcaaggcaggaattaatttatttgtctaatgtgtagaaaattatgctgccacatggatttaaactcagatatccatgatgtgtcatctagatcatatttctcgattggaaatagaaaataatttattttttacttgtaaatttttgtccatctggcttctgcattgctgtattaactatcaaaaatatcatccacatgaacattagtgatcgataagctgctaccgacagcatgatttgaggaaagtataatgaatgttccaggcctgacagcaaggatagctgaagaaattggaaatgagtaagtagagaccatcatttttttgtgctgtgtgattcattatgattctccacttctaagagcaagtttaatagtatagccaactactacctccaatttatatatagccaatctaatagcttattaatataatagttatatattacactattaatacttggtcccacctatcatacacactaggtcttggagttcgtgctacagctggctataaatctatagctcgctgcttttctctctcctcatttatcttcttaaaatatgtttgtacctcctctaatgagtagtacgtgcgcaagctggaaggggtaaggttggtgtaattaggtgtcaggtggtatggtagaagctaagctgaccaacctcttgaacctgcacattagaagacatatttttggtccttctaaatacattgtataaagtaaataaaactatataggtaggagtaggtggcaaaataagtcgcagtaggatagcaggagcaagaaatcaaatttttactgtttcttaaacgttttaaatttttatttttaaacacaaacacttcaaaacttatttctaaataatctttttggccacgccaactattagtaacaatggcacacctgctgtgaggtagagtgacagtattgttttgtcatgttaaactgggtgatgcgggcaaaagttttaaatttgaaataagttttaggatggattattttaaaattaaaaagttcaaaaaataaaaaaccccaagaaatcagtatagtttggcattcgggaattaatcttaggtctgatgtacctgtaccacattatttttttgtcagtttattttcgcccatctattttgttctacatgtagacacgcaagtacccgcttcgtccctaaaaaatgaactttaaactatgaatcgtaaatctgaacaaagtttattttcacattcataaccggaagttggttgttttctaatatagggaatatgttactagtagtttttttttaatatagggaatatgctatcgtcatcaatggttggggtaatccatgctgtaacagcatgcctcactcaattgcgctctaaagaaaaaaaaaaaaaactccctcaattaagacttgagagacaatcacttgccgcacatgcaatggtggtgcctttcccatctactatctcctagtaacctcctagcccagacacaagcagcaattccttgctattgacgaaaacatgagcacgatgcaaaatgcgatcggatccaggagcagagcagcggccagcaatactaaaatcgagatgacacttgggcttaaaacagcagaatgagatgtacgggcaggcacatgtggagggcgtgcttgtgcttggcgttatgaaaggctccatatcccgcatgtttcgcgccagctcacaagggcttgtttaccatgctgctgctaacttgtgcccgaccttgagggcccagcgctccgccggatgctccgggaggtgtttgggggtgtcggtggataaaaagaataaaggcaaaacaacgaagattttttttttgagagaacaaacaacaaagcgaaaaatacttgttttacctccttttttaaatgtctcgcatggacgtttgcgtgttctgacgtcataagaagcaccggacatttataggtgcaaaatctaatctaccccatatataactagccacatacagtcgtgctttgcacgactttgatgccggtttaagaaccttctctataagccatgatatggcataggctagcttacaaaatattgattgggctgaacaaattataaatttggcaagtaaattggggcaggttaaccatatgtccatactattttcttgatatatagtctgcaacatacaatatacaatcaatttcagcttatcattatatcagcactcccaccttatactctgaagcaccgatagtagagcatcagttgacaaatataaatagactatagtaacaaaagcatccagattgcagttagaaagacttccaattaactttttaacacctattatgctgtgatatgattgaatttaccgattcttattagtggggtaggaataccatatgcacaacagatcagcaggtgaagctttgtcagcatgttcagaacttgtattttccacagtgctttctgtgatatagcatcgaaaaataataatcaaatgagccaaaaaaaatcgtaaatgactactggaaaattggtatcatcaacttggtaaatacatcccatcagagagaaaaatataatacttgttcaatcaagaggttgactgttctatttcgcagtctaatgacatgcttggatggatcaacaaatggtaaagaccagagcaatttagtcaaagggcacaaggcattagatagaacaatttgaatcaagataaagcaacaataacatcagttgaacatttgatgtttaagcggctcagaataagttttgctaatcataaataatttaggtaagtcaaatatttaatgcaaatattccagaagtgtgaaacctactctgaatactgaattttggctaattgtatatagattggttcaggtggagtgaacctcatctgatagcattcaggtacctaaagatcttaggcaggtaatcaatctatatgattacctaagaaaatttgcttcagttcataggataaaaatataattcaatcttaataagtttggtcagcgttaatttcttcgtaagtccaattgtcgaggagtgatcctctctagcgggagatcgtgagatcccccttttgtgagttcggccgggggaaagggttcgcctctcgagatcgtgtatccgccctcagggtttctaaatcgcgtatgggcaacaagattatataggttcgggccgctatgaagcgtaataccctactcctgtgtgtgggattagtggttgaatgttacaagggttcctaaactccggagagcgctcttgctcttcgcttcctagagttcaggcctactcagtgtcgttctcctttttcggcgggcaaggtcctccttttatagttcaaggggataccacatgcgccgcttctacctactctttcacgggagagggacccactttactttgaccggaccacgatccgtgccttcgcccggaatctaaacaagcagtccgtccttgagtgggacccggcgccgccccccgcctgacacgggggacagccctgtcattccctcttaaatgagtgaagacttgtagcggtcctcctcacgtggagggaactccggataacgctccaatgggacgggacatacctacctccactctgccggatacagaggcaacgtgggggcacgcctgcccgtccaattggacgtgaccggcaacaggccggtcacagactggtcacacccgattgacgtgggtcagtcgggcggcaccgcacgtctgcccttaccgcattaaacgcggtgagggacaattcgggcgccgcgcgcattgatggcggttcggcttggtcttcttcccggtcgctcccccgccacatggcggttgggcgaggtgtcacgaccggaaataacccaacgggcgttccttacgtgcgtgcattattccttgtcccaggaggcaaggtacaccaaaagttgatacaattcagagtttaacaagcggaagcgtaattaattaatttattacatgggcggcgaagacccagcacacaagaagataaacgaaaaacagcggaagactaggacgacgaccacaggcgcttgacggcaggcacgagctagacaccaaagccttcatcttccaggggctcctcttctgggtttgggcaaaattgagcaagactgagtacaaccaccgtactcaacaagacacacccacaagtgtagaataaatgcaagggagtacaagggggttaaaatataaagggttagggtttgcagtaaacagcattaaaagacacttagttgctcaaagctattttgtaaacacgattctagagctaaataatattattaatcaaggccgtgaacccacatgaacctgccttaacccaaggcctacgatgattcagatcgaactggcaacccgaccctgggtcccagctcgtcccaagctaacccaggccaaccattccacattttagttgttaagcaggttttaagaattaaaaacactaacttgggtacattgctcggcttgcccataaccgatggcgcggctattcgaatagattatactctgatcagaggtgtacatctttacccacaagacacatcttcctcacatgtaaccatgtgccacataccaccacggtatacggacggaagacgtgacatagtttccaacccatcctagccatagacaagagtaccgacccaaccccacctacggccggaacccccgggacaggtaggcaggattgagcccctagcagcaggacaccggccctgtgccatgacatctcgactaccgggccgcagctcgtgtagccttcatttgtcctagagatgtccatcgaccccgacttcgtccatctccatccgtgtacttttgtttataaccagactgagccacaaactaagccttacccactagacatgtggaagtatggtagtgctttgcaacagaggcccgaagaccggtccttatatggccgaggtgctactatcaaaaccatgcaccccgagcccagcctaaaaccattttgagggttttgaatagaggggaaggtgtgaatccaattccacaataatccatccattccatggtgtccaggtgatgagaatattcccaaagtctagagttgtaaaaccacctaatgttgcctaattaaccagcgaagcatctacctaaaatcatactagtggtaccatgagtagagtgtccactagttggggttttgtttaatctagggtgaacaaggtaataatatcaataacaataataataaggtcataacaaaggtaaataggcatggctaaataaaacagtgataacgcgggaatttaagtaaagcgatcatgcaataatttaaatcaaaataattttataaactgggattcaatatgctcaagaatgatgtgactttccttgctcgctttcccaaacgtcggcttcaacctccacgaagagcggatcttccgaagctgcagcgtctacacgaccaacggaaaagaaaaggcttttactctaataaactccatataaccagcaggaacaaagcacaaaaatgggttcttgacttcttaaggaaaaattagagacttgaacggtccaattccgagttcaaatggccaagttatggccatttgaagtttatatgctctttaaatgaatatttgcgaatttcttcatttaaattttaatttaaaaagggtttattgcgtcagccgagggggaggggcgcgcgcaccgggtccacgggagtggggcccacgcggcagcctcacggtccacggtggactgggcgcacccggctcgcaccggtcggcgccgtgggccccacacgtcagccgcacccgagggcgcgggcggctgacggccgggccccacgcggcagccactcggcgcgcacgcgggcggccacgccggcgcggtcggcgggaggcggcgcgcccgtgccccgatggtcgccgccggcgaccaccggcgcggcggagcggcggccgagagaggggagggaagggggaaaggaggcgacggtccacggcttaccccggggtgacggcgacgacggagggggcggtcggagcggagggaggcggcggcgcggctcgggttgacggggtcgacggcgttccggcggtcggcgaccgaaacggagaggtggacgagatcggcgaggatgcggcgaagtcgaaggaggcggcgccgaggtgggaggcggtccggggcgacgacggcggcggaccggagctcggcggcgacggcggagagagagagcgacgttgcgggctcgaatccggcgaggaggaagggcgacgagaggcggaaacggacggaggaggtgcggggagggtttaaatagggttttaagggggagagagcggccggaggggaaggaaaccggcgcgggaggttcggccatcatcaatggcgccggcgagatttgcgggggcaaatccgcccgtttgaacgcgagagagagagggaaaaatggggggaaagagagaggggatcacggggagtaattccccccactttattgcacgcggggacggcgggaggcggcgggattcgcggcggcggcggcgctagggcgcgggggaggcggcgggagcggcgggaggaaggggatgacgggtgggccccaattgtcagcgagggtggcgggcaggcccgcccgtcagcggcgcgcgcgcggggagaggccggatgggccgcggggagaggagagagagaaagggggggagagatgggccgggccggcccaagggagggaagggggactttttagggttttttctttttataaaacctttttaactttgtttatttcttaacaattattatttgtgctctgaaaattccactaaaatttatttacgtattttaggcttttaggaaatattcaaaaatcctctaagcattatttgacttttaactttgcacattttaattgttggaggctttcacacggattttaattattctaggcataatttagaggatatattttacggtcgttttgggacgtgacaaacctaccccccttaaacggaatctcgaccccgagattcggaagaactggcgaagagatcgggatgggctgccttcagctcgtcttcacgctcccaagtagcttcttcctcagcgtggttgctccattggactttgcaaaaacggattacccggttcctggtcctgcgctccatggcgtccaggattttcaccggtctctccacgtaggtcaagtcttcgcgaacttcaatttgctctgagtcggcctactcggacggcactcgaaggcatttcttgagttgcgacacatggaacacatcatgcacgttgcccaatgatgcgggcagctccaactggtaagcgacttctccgcgtcgagcaatgatacggaaaggacccacgaaccgaggtgcgagcttccctttcgtctgaaacctgtgtacgccccgcaatggcgtgacccgaaggtacacaaagtcatccactgcgaattccaggtcacggcgtcggttgtctgcataactcttctgccgagactgggccacctttagattctcccgaatggttctgattttcgctttaacttctctcaggatatcagtcccgaacacttggctttccccaacttggtcccacaatagcggtgtccggcatttgcgtccatacaacgcttcgtagggtgccatttgtatgctggcttggtagctgttattgtaggagaactcggcataggggagactcttatcctaggtcttcccgagatctagaacgcatgcgcgcagcatatcttcgaggatctggttcagatgctcggtctgcccatctgtctgtgggtgatacgcagtgctgaaatttaatcgggtacccaactcttcttggagcttcttccagaagtgagaggtgaattggcttcccctatcagatacaattttcttaggaacgccatggagactaacgatcctagcgaagtagagttcagctagtttgttccctccataggtggtcttcacaggaataaaccgggctaccttggttagtcgatccacgactacccatatagaatcatattcgccctgggtttttggaagtccggtgatgaaatccatcccaatttcatcccatttccattttggtacttggagaggttggagaagtccggccggtcgttggtgctctgccttgacacgctggcacacatcacaaagggccacaaactttgcaatttcccgcttcatactaacccaccagtatttctctttcaagtctaagtacatcttcgtactgccagggtggatggaataaggactttcgtgagcttcctgaagtatcagctgtctaagttccttgtcgtccggaacgcatacacgatttccgttccatagggttccatgttcatcttctgtgaaaccagcggctttaccttgtttcatattcttgaggatcccatgcatatctggatcattcttctgagcctcgctgatttgatcgagcaaggtaggcttggcttccagcgtagccaagaatccacgactaactatgcttagattcagggcttccatctgttgattaagttccggtggaatgtcacagacgccaagagtgttgcaacggctttttcgacttagagcgtcggcgaccacgttggccttaccaggatgatagtgaattcccacatcataatccttgatgagttctaaccatctcctctgccgaagattcagatccgactgagtgaagatgtatttcaaactcttatgatcagtatatatttcacagcgattcccaatgagatagtgccgccagatctttagagcatgaaccacagcggctaactccaaatcatgggtagggtagttgccttcatgaggccgaagctgccgggaggcataggctaccacatgaccatcctgcatgagcacgcaccccaatccttggcgcgaagcgtcacagtacaccaggaagtccttgcgagtatccggtaagattaacactggcgaggaaaccagcttttctttgagagtttggaatgctttctcgcattgcgggctccacacaaatttttcttccttcttcagcaactgcgtcatgggtctggcaattttggagaaattctcgatgaatcttcggtagtacccggccaaacccaaaaagctgcgaatttgagtgactgtcttgggttgcttccaatcagtgacggcgatcactgtttcggggtccacagcaactcctttagcagatatcacatgccctaagaatttgacttcggacaaccagaactcacacttgctaagcttggcatacaattgatgttcccgcaactttcccaacacccgacggagatgctgctgatggtcttcctctgattgcgagtacaccaggatgtcgtcgatgaagaccacaacaaacttatccaagtattccatgaacactttgttcattaagttcatgaagaaggcaggagcattagtcagaccgaacgacatcaccgtgaattcatacagcccatatcgcgtggtgaacacgatcttcgggatatctttttcacgaatacgcaattggtgatatccggagcgaagatcgatttttgaaaagacagtggcacctttaagctgatcgaacagatcatcgatccggggaagagggtacttgtttttgatagtaacttcattgagagctctgtagtcaacacacatcctctttgtcttgtccttcttttccacaaaaatcacgggagcaccccagggggaagtgctcggccgtatataccccttttctttcaactcttccaactgtttcttgacttcggccagttcatttgctgccatacggtagggtcgcttgtacagaggagtggttcctggagcaagatctatccggaactcaatctctcgcttgggcggcataccgggtagttcttccggaaacacatctctgaactcactgacgatgggggtttccgacagtcctatctgatgaagttctgaactgccgacagaggttgggggtgcaaagaaaactaccggttgttccggccctcggtacagagtgacagtgcgtcttgcgcaatccactactccttggaattgagccaaccaattcatcccaaggatcatatccaagttcttggtgtctagaagaattagatccgagggaaaaggaattccatggatttctataggaacggcagggctataatactttgctgtcataacccctccaggggtggtgatgagcagagggttcctaagcctttctacccccaactgatttctccccacgaatggcacagatataaacgagtgggaagctccagagtcgaacaaaatggtagcagggatggaatgaatgaggaacgtaccaacgatgacgtctggagttgtcagcacatcctcggcagtcacgtggttcacacgaccccgaatgacatccttaccaccgttgttggggcggggaggcgcttggccttgctggcgcctcggctttgggcatttatccgcaaagtgcccgggctcgaagcagtcgaaacacagacgctgctgaccttgaacgtctctgcggccttgtccaggctgcacggctggcgtaggaggacgggacgcacgggtcccttgctgactctgctgctgctgcggctgtgggacgcgcaccacgaattgaggtcggggcgcggagcgaggttgctgctgttgttgctgctgtgaggaggatccccctggatagggattggtgtagtggaccctttggttagccccctgttggttgcggaaatttgccaagcgacgcttgtgcgactccagttccttgtgcttggcttccaagcggatgctcttgtccaccaaacgctggaaatccggataatccccggagaccagacgcacggacagctcagggtccatccctgccaagaacttctcttgcttctcctcatcttcacgaacatcctccggggcataccgggccaggttgttaaactcatgcaaatactccatcatagagcggttgccttgcttcaactctcggaattcccttttcttaagggccatgactccggtgggtacatgggtcctccggaaagcggcggtgaagcgggcccaagtaataggttgtccttctggctgcgtagcctggaagtggtcccaccatagagatgcgggcccttgcagttggtgagcggcaaagatgactttctcctcatcgttgcactgcacggtgtataactttttccccacggtatgcaaccaatccaaagcatccacggggttattggagctagagaaggtaggcggacggatgcggaggaactcggcgagtttagagtgttgcgggggtggtggtggaggtggagcattatgctgtggcggattttggatgtggtggaggaaagcagccatcatgttggcctgctgggcgaggatttgggtgaggatggagttggtgtctggtggtggtggtggaggcgggggaggaggcggaggtgggctgccatggttgttgtggttgctacccttcgggttggttgccatcaccggtagtagcacttctcctggttgtcaccatctgaaaatcccacacagaatcggcaaacagagaaagctgactattaaaactaaccacccacgactaccataattcttgaatttattactgctattaaattggttcattaaggttcaagttgcttaaacaaataaaataaagacaggctccgacacagttataccacacaccggtataaccatgccccacacgactctagcagaaaaacaaacgagaagaacacacgcgcaagactactaactgctcgtctacttctgcgacgggccagggcggaaggtgagcagcagcgcatcctccgtgctgccaacgccggaggctccctcctcctgaggaaccacgggcgcgggctcggcacgaggggtctcgacgaagcaggtccacgccggggactgacgaacaagctcgggcctggaggtactcttgcgggcggtgatcttcaggctgcggcagacgcgacggtgcttggggcgacatacctctccctgggcgatcttgagctgacacagctgcgcctccactgcgtctaggtccttcttcagctgcagattctcctgacgcagctccaggatcttcatgttgttctcgaccaacccacgacgcaccatatgatggaagtcgaaacgagccgcgtcgtacgcctccaccatgtgcgccaggtgcatgatggtggcgtcatcctccgagctagcatcccggaaggtggcgtagtcacgggctcctccgcgacgagggtggtagcggtagggcgagtgctgcaactcgtccgggtagcgctggtgcagagtgccgatggcgaggagagcggcgttctggcaagcggcggagaaagaatctccacccgcggtgactgccaacgaagtcctctcgggtgagccagtgaggatcactgcagtgacctcccaagtagcgtggggctctgcatcgtcaccctcctgctccgggagttgcttgccctggtagtccactccatgcgaataccccaagacaacgcacatgccgcgcagctccaaaacgaaaccagtcaggtccagaccacgacggttgatgctgccggccgtctacaaacaaaaaaaacaaaagagaaaagcaacattttaaagattagattttggcgataaatgaagcagcaggacagagagagactagaggattttcacaaataagaaaggatttttatttcaaaaatattgctaaggcttgggatctaaggctcgtcctagggtcaagggggctctgataccaacttgttacgaccggaaataacccaacgggcgttccttacgtgcgtgcattattccttgtcctaggaggcaaggtacaccaaaagttgatacaattcagagtttaacaagcggaagcgtaattaattaatttattacatgggcggcgaagacccagcacacaagaagataaacgaaaagcagcgaaagactagggcgacgaccacaggcgcttgacggcaggcacgagctagacaccaaagcctttatcttccaggggctcctcttctgggtttgggcaaaattgagcaagactgagtacaaccaccgtactcaacaatacacacccacaagtgcagaataaatgcaagggagtacaagggggttaaaatataaagggttagggtttgcagtaaacagcattaaaagacacttagttgctcaaagctattttgtaaacacgattctagagctaaataatattattaatcaaggccgtgaacccacacgaacctgccttaacccaaggcctacgatgattcaaaccgaactggcaacccgaccctgggtcccagctcgtcccaagccaacccaggccaaccattccacattttagttgttaagcaggttttaagaattaaaaacactaacttgggtacattgctcggctttcccataaccgagggcgcggctattcgaatagattatactctgatcagaggtgtacatctttacccacaagacacatcttcctcacatgtaaccatgtgccacataccatcacggtatacggacggaagacgtgacatagtttccaacccatcctagccatagacaagagtaccgacccaaccccacctacggccggaactgtcatgcccagaaattcccgagtagaattccaagcagaatgtgcattaaaatccccgtccaggaccggccggggtacacaaacgacaatgttgacattcagatccacgtcttacaaacatcataaaagtcttacacaaatgcagcggaagaaaagaaagacagcaggagctaagccttgactagaactgcagcgggaacaccactccacaggcatcctcgacggcacggacgaagcctactcctcggagaaaccttcatctgacacatactcgagctctggggttgggaaaaaaatagagcaagactgagtactacccactgtactcagcaagtcataccggaataggggtatgatgcagggaattatcaaagaagagctggagtggttcatttgcataaagcgagcatttataaacagaagttgaaagattaaacaattgtaatatttaattagtattaactatccactgtccaacgttatcccacgttgcaacaggcccaaccatccacctaaactatccaaattcaaaagattacactagggtgagactaatcacggtgaatctggttgaccgcccataaccgcgggcacggctattcgaatagttttactctgatcagaggtgtacaactgtacccacaagacacagccccacaacacgtttccgtgcgccgacatgccaccacgacatatcggaaagaggccgtgacagggcccttcgcctaaccccctctagccaagcacaccacacctcaggtttcacccccgtccccagcgggcaacgggcagtcccctctcgtgcctaggtgaatccgaaagcgacagaggccgtcgcagggcccgccccgctccatcacgcccacccttgcctggatgcgtcggctagaggagagctacactacaagcccagccgttgcccacgctggcttgtggtaagtacgataagttcttccagggcatcccgcgaaccggtccttaactgccatgggtgcgaccagcaaaaccatgcacccacagcccaccatgtgatttattttaattaaccaacaccaaagcggtgtcactaaaccaacaaaaccattagaaccaacagtctaaacattaataggattttccccattgtgcactagttgaactaagcatggctaagcaatccctagtccaatctctagtcatgttataaccccaagctgacaaagggacatggtacgacagtagcatggctatgacaataggtaaccatcccatagtaacattataaaacaatgcaatatttgaaagaaaacaatagagcatttgcaatataggatcaacatgttcaagtgacaagcatgacttgccttgctctgctgctggaggaatctcggcgactatttcgaagtacaccggagcgtcggaggaaccggaatctagcgacatacaaggcaaacattgcaaacaggctataagactactgaaacaggggacaaaaccatttttaatggattctacacatttttcttgatttactgagacttgaatgggcttaaaaggagctcggatgaattagttatgaattttagaagattcagtgtgtttattactataacaaaaatccttaaatattttattgcgcaatattttccagggctgacgtcagcacggagggggtgcggcgccggcaagcggggcccactggtcaacggctcaggggacagcggttcaccgtggaccgggaccacgcaggtggtccaccgccggtccacgggaccgacagcctagatcgccctcgggccgatcggacgggcggcgatagaggcggccgccgggctcggctcggcatcaaagccgaccggccggccagggctagcggcggcggcacgcgcgcgtcgcgttgccggtgacggcatccagcggcggaggcgacggcgcaaaaacgacgcaaaagcggcggcagcggacggcggcaacgaccaaaggcgacggcgagcgcgagcggcggcgacgcacggggaattgggaaagaaaatgaaaggggagggagccctcaccggaggggacggcggcgtccggcgacgaggagcgacggagagaggtcgacacgcggcggacggcgaccaggacgacctaaagaacgaaaagaaagaggttagagaggaagagaggggccataggagacgggaatgccggccgaaagcggcagacatggcgaccctcatcgtcgcatgatgggaatggcgctccggcgacgaacctcgacgaaggaggggtggacggggtggatctcggccacgcgaacccaacggcggcgacggcgcggtgcggcggcgaccccagcggcggctagcagcggccggagtagcggagacggcggcggcaagaggttgcacggcgcgggagcgatgggaggctcgggagagttcggcgagagggggaaaaagcgagagggagcgacggagaagcttaaataggggaggggagggtcggacgtggccgggaaaggcgggacttcgccggccaacgtgggaagtgggggaggagagagaggcgggattcgaatatcgaatcccggccatctcgggcgcgggcgcgagcgggtgagagaggggagtgggcgcggggaacgcggcgcacgcgcaggcgtggtcgacgtggcccgaaggaggcggagacgtgggcgcggcgacggttgcgggcacggcggcgcggcgggagcggcgggaggttggggaaggacccgacaggtgggccccacctgtcggcgacccagggagaggagggcggcggggcggcctggctgggcctcggcctgcggccggcccagcagggaggagggggaggaaaggagagaatgggccagcggcccattcgaaaaagggaggaaaaagaaaaagaaaaaggaaaaaggattttccctggaattaaaatattgcttgctcaattttaattggttaaaattatttctagggctctgaaaattccactaaaaatcctgttagagaatttcgacatgtagaactcaagaaaaattccacatgccaatttcgattattatttgcattgatttaaaagggtttactcttgctttgcaccggtattttcttagggtcatttgtaaattaaatttaggcttgggaggagaacttcggggtgtgacaaacctaccccctttaaacggaatctcggccccgagattcggaggagctggtgaagaggtgcagatgggcggctttcaactcatcctccctttcccaggttgcttcctcttttgagtgatgactccactgaattcggcaaaacttggtgaccttgtttctggttcttctttcgctggtatcaagtatacgaaccggcttctccacgtatgttaggtcctcctggatatcaatgtgttccgaatcagcctgttcttcaggtacccttaagcacttctttaattgggacacgtggaacacgtcatggatgccgatcatattggatggaagttctagctgataagcaacttccccccttcgttccaggattttgtatggtcccacgaagcgtggtaccaacttgcctttcgtctgaaaacggtgtactccccagagcggagtgacacgaagatacacgtaatcccctgcttcaaaaatgagctcccttcggcggttatccgcgtaacttttctgtcgagactgggcaatcctcaacctttccctgattgttctgactttctcttctgcttccgctaatacctctgtcccgaacagttgacgctcgcctgtctgctcccagaagagaggtgtgcggcacttccggccgtataaagcttcaaacggtgccacctgtagactggcctggtagctgttgttgtacgagaattccgtatatggcaagcttttgtcccaagctccaccaaaatcaagagcgcaagctctcaacatatcttccaagatttgattgactcgctcggtctgaccatcagtttgcgggtgataggccgtgctgaaatttaaacgggtccccaattcttcctgcagcttctgccagaattttgaggtgaactgactccctcggtcagatacaatctttttgggtactccatgtagacacatgattctcgagagatagagctccgccaaccttttgcccgtatacgtggtatgtactggtatgaagtgagcaaccttagtgagtcgatccacgactacccagattgaatcgtgacccgatgatgtccggggcagtcctgttataaagtccattccaatctcctcccatttccattccgggatttgaagaggttggagtaaacctgctggtctttggtgctctgccttcactcgttggcaaacatcgcagagtgcgacgaattcagctatttctttgctcatgctgacccaccaaaacttttctttgaggtcttgatacattttggtgctgcctggatgaatggagtactgggcctgatgagcctcggtgagtattagatccttcagttccttgtcgtcaggtacacacaatctttctcccaaccagattgtgccatgctcatcttcgtggaaatctcgggcttttccgaccctcatgttctttttcagctctgctatttcagaatcatttacttgagctgctctgacttgatccacgagcataggccgtgcctccagagcggctacgaacccgtgttcaacaattcccacgttgagatgctcaaactcctgccgcaattcttcacacatgctctcgatgcatagggcagtgcagtaacttttcctgcttaacgcgtctgccaccacattggctttacccgggtggtagtgaatgctcatgtcatagtctttgattagttccaaccatcttcgttgtcggagatttaggtccggttgggtgaagatgtatttcagactcttatggtccgtatatactttgcagcggttgccaatcagatagtgcctccagatcttcaaagcatgaaccactgctgccaattccaggtcatgagttggataattcccttcatgtggacgcaactgccgcgaggcatacgcaaccactttgccctcttgcattaggacacatccaagtccgtgacgggatgcatcgcaatagacttggaagtctttcatctggtcgggcagaattaaaactggtgcggatactaatttcttcttgagctcctcaaaactcttatcgcactcaactgtccatttaaacttctcatctttcttaagcaactgagtcatgggtcgggcgattctggagaagttttcgatgaatcggcggtaataacctgccagtcctagaaaacttcgaatctgcgacacggtcttcggtggggtccatttggtaactgactctacgtttgatgggtcaactgccacaccctgagctgtaatgacatggcccaaaaatttgacttccgtcaaccagaagtcacacttgctgaacttggcgtatagctggtgctccttcaacttctcgagtaccaggcggagatgttgctcatgttcttctttggactttgaatagataagtatgtcgtcgatgaataccacaacaaacttgtccagaaatttcatgaacactttgttcatcagattcatgaagaatgcgggtgcgttggtaagtccgaacgacataaccgtgcactcatataatccgtaccgagtggtgaaggccgtctttggaatatcctcctcccgaattctcaactggtggtagcttgatcgcaggtctatcttagaaaacactttagctcctttcagttgatcaaacaaatcatcgattcgcggcaaaggatatttgttcttgattgtgacctcgttgagtgcacgataatcaacgcacatcctcttcgtcttatcctttttctccacaaaaatgaccggagcaccccaaggtgaagtacttggtcgaatgtaccctttctacagctgctcatcaacctgcttcttgacctcggctaattcgttagccgccattctgtacggtctcttataaattggagcggttcccggtgccaagtcaatccggaattcaatctctctcttgggtgcaatggtagtgaggtcttcggggaatacttctggatactcgcagactatgggtatatcttccaatttcctcaagttcttctccacagtgtccactgggatttccgcttcaatctgattcaaagagacccctcgctttggtgcgtctggtgattcgtacactaccgtttctcccttctcgttggtcaaggtgacggtacgattcgcacaatcgatgactcccttaaacttggtcagccaatccatcccaagaatgacatctaggtctttggattcgagaagaatgaggttggctagaaatggtgatccttgaatttctattgttatagaagggctgaattgaaccgaagtggagctattccctggggtatgaacccgcatcggtgtgctaagttcctctcttattaacccatgcatctcgacaaacttctttgaaatgaacgaatgcgttgcaccagaatcaaaaagtactgttgcagggattgagttaacaggaaacgtacccagtacaacctctggtgctgcttgagcctcctccgcggacgcgtggttgacacgagcctggataaaccttgtcccggcacgcctaggctttgggcatttgtcagcgaagtggccaagctcgccacagttgaagcaagaccctggttttgttccagtctccttcttggcttgcgcggacgggcctgactgtgccggtgccgttggtgggcgtggagctgcaccgcggctgggctgacctccatggtggttctgactgcctctggcgccctggggaaagttgctagggttgaacgggcggtactggcggacgatcatggtggtaggtccaccctgctgcccggaagcgaagcgcggcctctggtgactcccctgaggtgccctgaactgagcggccttcctcttcctgtccatcttgttgcgttgatcctcctgacggattgccttgtcaactagcctctcaaagtcggcgtagtctccagatatcagttggttggtcagctcatcatccagacctgccatgaacttttcctgcttctcggcgtcggtatggacatcctcgggtgcatatcgcgcgagacgattgaactcatggaggtactccgtcacagtcccgttgccctgatggagtgcccgaaattccctcttcttttgtgccacgaccccgtctggcacctgcgccttcctgaagctacggcagaactctgcccaagtgacttcagtacctggtgggcgggtggccatgtgattgtcccaccaagctgacgcaggaccttgaagctggtgtgtggcgaaagcaaccttctcctggtcattgcactgcaggagattcagtttcttctctatggcatggagccagtcattcgcctccatatggttggtggtgctggagaaggtgggtggcctgacacgtagaaactctggcaacttggactgagggggagggggaccaaactgctgatgctgctgttcggcgtgctgcagcatccgctggtgcatctgctggtgctgctgcatctgttgcatcatggctgccatcatctgggtctgatgtgccattacatgggctagcgtcggattctcgggaagtggtggcggaccattgccggaatcgctgtggggatgcgccccatcagtgcgctcttcgccgttgctgccctcgcctgttgcgcggctaccattcctggtgtagaccatctggagggaaaagcagacgggggaaagaagaaaaacagatgctcaggaactaagctttattacataggaatttaaactgcaattgttctgatctgaattaaaacacttaaagagcaagcaaaaatccttatttagacagccatatcagaggcacatgatatcgaccgtcaactgatcccaaacaagcaacctaaacacacaaactaacaagcagaagctagacagtcgataaactaatggaaaacgagcctaatgctcggaacagctcctgcggtcggtggagtcgaaggcgtcctcctgctcgtcaccaggtccctctgagcgactcctggagcctggcagataagtctcgccgctgcccgactctgagctactggagctgttgctgctgagatcgcggctgccactgggagtagcagacaaccaacctccgttgccactggctggacccctggcagctgatgctggagcgaaggagagagcggacgtgggagctgacacgtgaacaggagctggagctggtgctggagctgcaggaactgtcggagctgcgggcggaactggaggtgcgggaactgcgggcggaggtgggttcctgggcgcaggctggatgcgcacaggtgccgtcgtcgtcttgcggggtgtagtgcggatccggactcctcctggcgcgggaagactctttaactgagcattctccctcttcaggcgcgctatctcgtccttcagagcgacgatcctcatgagcttcccatcattcaaggccttggtcgccttgtgcaggtccgagtgcatcctatccaatcccctcatcacagcacacatgtgaccaaaggtggtgtcgttctcgccggctgtcggacggaaagtactgacatcaccaccgctggctcgacaagggtgaaatcggtacgccgtgtcgtggaagatgtagttgtggcgctcccgtagtctggccatcatcaggtatggtgcctcctgacaggcgtgatctgctgtgcctccggatgcctcaaccaccatattagctagacaggtacccacgtagccgtggacctccaggcgaacacggtgaggaagctcgccactgagtggtggaacagtcgtgtactctggcgcgttggggtagcccaccaccagcgtcatgcgtgccaactctgccacaaagtcgatcatgccttctccacggtggttggggggggtggccggccatctagagaagacaaaggagtaggatcaatgcatgctcaaatccaaatttaaataaagcaataaaagactcaataagagaatcgaataagagcgaaattttatgcatagatcattttgcatgagagcgaataaagaagacagactcacataacgataaaatagtggggaaattacatacatactataataacactaataacataaataccttgcaacccatgttcctgagctaggacctaatgcatttcacccatcaaatcccaactgactgacgaataaatctcaatagttttactaaaaccctagactgactcgttttgacaaatctcacttaaacgagcgatcaagatttttccccttgaaccacaagaacagatcccaattttcccggaacaaatccaattgcaaagaacatatgcaatgaaaaggattcggagggctcttaggtttttccatttggcttgtcctacggtcaagttcggctctgataccaacttgtcacgcccagaaattcctgagtagaattccaagcagaatgtgcattaaaatccccgtccaggaccggccggggtacacaaacgacaatgttgacattcagatccacgtcttacaaacatcataaaagtcttacacaaatgcagcggaagaaaagaaagacaacaggagctaagccttgactagaactgcagcgggaccaccactccacaggcatcctcgacggcacggacaaagcctactcctcggagaaaccttcatctgacacatactcgagctctggggttgggaaaaaaatagagcaagactgagtactacccactgtactcagcaagtcataccggaataggggtatgatgcagggaattatcaaagaagagctggagtggttcatttgcataaagcgagcatttataaacagaagttgaaagattaaacagttgtaatatttaattagtattaactatccactgtccaacgttatcccacgttgcaacaggcccaaccatccacctaaactatccaaattcaaaagattacactagggtgagactaatcacggtgaatctggttgaccgcccataaccgcgggcacggctattcgaatagttttactctgatcagaggtgtacaactgtacccacaagacacagccccacaacacgtttccgtgcgccgacatgccaccacgacatatcggaaagaggccgtgacaggacccttcgcctaaccccctctagccaagcacaccacacctcaggtttcacccccgtccccagcgggcaacgggcagtcccctctcgtgcctaggtgaatccggaagcgacagaggccgtcgcagggcccgccccgctccatcacgcccacccttgcctggatgcgtcggctagaggagagctacactacaagcccagccgttgcccacgctggcttgtggtaagtacgataagttcttccagggcatcccgcgaaccggtccttaactgccatgggtgcgaccagcaaaaccatgcacccacagcccaccatgtgatttattttaattaaccaacaccaaagcggtgtcactaaaccaacaaaaccattagaaccaacagtctaaacattaataggattttccccattgtgcactagttgaactaagcatggctaagcaatccctagtccaatctctagtcatgttataaccccaagctgacaaagggacatggtacaacagtagcatggctatgacaataggtaaccatcccatagtaacattataaaacaatgcaatatttgaaagaaaacaatagagcatttgcaatataggatcaacatgttcaagtgacaagcatgacttgccttgctctgctgctggaggaatctcggcgactatttcgaagtacaccggagcgtcggaggaaccggaatctagcgacatacaaggcaaacattgcaaacaggctataagactactgaaacaggggacaaaaccatttttaatggattctacacatttttcttgatttactgagacttgaatgggcttaaacggagctcggatgaattagttatgaattttagaagattcactgtgtttattactataacaaaaatccttaaatattttattgcgcaatattttccagggctgacgtcagcacggagggggtgcggcgccggcaagcggggcccactggtcagcggctcaggggagagcggttcaccgtggaccgggaccacgcaggtggtccaccgccggtccacgggaccgacggcccagatcgccctcgggccgatcggacgggcggcgatagaggcggccgccgggctaggctcggcatcaaagccgaccggccggccagggctagcggcggcggcacgcgcgcgtcgcgttgccggcgacggcatccggcggcggaggcgacggcgcaaaagcgacgcaaaagcggcggcagcggacggcggcaacgaccgaaggcaacggcgagcgcgagcggcggcgacgcacggggaattggggaagaaaatgaaaggggagggagccctcaccggaggggacggcggcgtccggcgacgaggagagacggagagaggtcgacacgcggcggacggcgaccgggacgacctaaagaacgaaaagaaagaggttagagaggaagagaggggccataggagacgggaatgccggccgaaagcggcggacatggcgaccctcaccgacgcacgatgggaaaggcgctccggcgacgaacctcgacgaaggaggggtggacggggtggatctcggccacgcgaacccgacagcggcgacggcgcggtgcggcggcgaccccagcggcggctagcagcggccggagtagcggagacggcggcggcaagaggttgcacggcgcgggagcgatgggaggctcgggagagttcggcgagatggggaaaaagtgagagggagcgacggagaagcttaaataggggaggggagggtcggacgtggccgggagaggcgggacttcgccggccaacgtgggaagtgggggaggagagagaggcgggattcgaaaatcgaatcccggccatctcgggcgcgggcgcgagcgggtgagagaggggagtgggtgcggggaacgcggcgcacgcgcgggcgtggtcgacgtggcccgaaggaggcggagacgtgggcgcggcgacggttgcgggcacggcggcgcagcgggagcggcgggaggttggggaaggacccgacaggtgggccccacctgtcggcgacccagggagaggagggcggcggggcggcctggctgggcctcggcctgcggccggcccagcagggaggagggggaggaaaggagagaatgggccagcggcccattcgaaaaagggaggaaaaagaaaaagaaaaaggaaaaaggattttccctggaattaaaatattgcttgctcaattttaattggttaaaattatttctagggctctgaaaattccactaaaaatcctgttagagaatttcgacatgtagaactcaagaaaaattccacatgccaattccgattattatttgcattgatttaaaagggtttactcttgctttgcaccggtattttcttagggtcatttgtaaattaaatttaggcttgggaggagaacttcggggtgtgacaggaacccacgggacaggtaggcaggattgagcccctagcaggaggacaccggccctgtgccatgacatctcgactaccgggctgcagctcgtgtagccttcatttgtcctagagatgtccatcgacccccgacttcgtccatctccatccgtgtacttttgtttataaccagactgagccacaaactaagccttacccactagacatgtggaagtacggtagtgctttgcaacagaggcccgaagaccggtccttatatggccgaggtgctactatcaaaaccatgcaccccgagcccagcctaaaaccattttgagggttttgaatagagggggaggtgtgaatccaattccacaataatccatccattccatggtgtccaggtgatgagaatattcccaaagtctagagttgtaaaaccacctaatgttgcctaattaaccagcgaagcatctacctaaaatcatactagtggtaccatgagtagagtgtccactagttggggttttgtttaatctagggtgaacaaggtaataatatcaataacaataataataaggtcataacaaaggtaaataggcatggctaaataaaacagtgataacgcgggaatttaagtaaagcgataatgcaataatttaaatcaaaataattttataaactgggattcaatatgctcaaggatgatgtgacttgccttgctcgctttcccaaacgtcggcttcaacctccacgaagagcggatcttccgaagctgcagcgtcaacacgaccaacggaaaagaaaaggcttttactctaataaactccatataaccagcaggaacaaagcacaaaaatgggttcttgacttcttaaggaaaaattagagacttgaacggtccaattccgagttcaaatggccaagttatggccatttgaagtttatatgctctttaaatgaatatttgcgaatttcttcatttaaattttaatttaaaaagggtttattgcgtcagccgagggagaggggcgcgcggaccgggtccacgggagtggggcccatgcggcagcctcacggtccacggtggaccgggcgcacccggctcgcaccgaccggcgccgtgggccccacacgtcagccgcacccgagggcgtgggcggctgacggccgggccccacgcggcagccactcggcgcgcacgagggcggccacgccggcgtggtcggtgggaggcggcgcgcccgcgccccgatggtcgccgccggcaaccaccggcgcggcggagcggcgatcgagagaggggagggaagggggaaaggaggcgacggtccacggctcaccccggggcgacggcggcgacggagggggcggtcagagaggagggaggcggcggcacggctcgggtcgacggggtcgacggtgtttcggcggtcggcgaccgaaacagagaggtggacgaggtcggcgaggatgtggcgaaggcgaaggaggcggcgccgaggtgggaggcggtccggggcgacgacggcggcggaccagagctcggcggcgacggcggcgagaggcgaaaacggacggaggaggtgcggggagggtttaaatagggttggaagggggagagagcggccggaggggaaggaaaccggcgcgggaggtccggccgtcatcaatggcgccggcgagatttgcgggggcaaatccgcccgtttgaacgcgagagagagagggaaaaatggggggaaagggagaggggatcacggggagtaattccccccactttattgcacgcggggacggcgggaggcggcgggattcgcggcggcggcggcgctagggcgcgggggaggcggcgggaggaaggggatgacgggtgggccccacctgtcagcgagggtggcgggcgggcgcgcccgtcagcggcgcgcgcgcggggagaggccggatgggccgcggggagaggagagagagaggggggagagatgggccgggtcggcccaagggagggaagggggactttttagggttttttctttttataaaacctttttaactttgtttatttcttaacaattattatttgtgctctgaaaattccactaaaatttatttacgtattttaggcttttaggaaatatacaaaaatcctctaagcattatttgacttttaactttgcacattttaattgttggaggctttcacacggattttaattattctaggcataatttagaggatatattttagggtcgttttgggacgtgacacgagggcctcgggggaggcagcgcgagagcccgaggggcgtgacgtggcaccccgaggccccctggctacttctgcgactcgcgaggcgcggggggagggccaggctgtagagccacgtgactggatgggaaggtaacttcccctcactttgcctacccccgggcccatatctccgacagtagcccccggcaccgcgtcggacattggccccccgagggcagtccgacgtggcgcctcacgacttcccgtgccgagttgtgggcccgacgaggaatccagacggttgccgccgggcggccaggctggcgcattagtcataacggctatttgaccgccactaactgtgcccataacggcgatttgaccgccactaactgcgccgatgatggaggcgcttagggcgcgaaaatcggggggtcggccagaccacgcccagaatcatcacccacgccgcctcgactcccccgcctgccaggcacgcgacgggaccgacagcgggcccgcctaaccatgcccgtgaacatcgcatggcccgcgccgaatgtgccgctgacaggtgcaccaaacgcggggcgcgggttcagtggggcggcgtgatgagtgggtgcgagagtcgaggaggaaaccgcaggtgcaggaatcgagggggcaaccgcgggggcgtgaaacaaggaggcgagcgcgggcgaggcggggataaaaggatagggaggtggagagttcgtctccttcctctcgccgactgctcacccgcatactcgctcctcaagccctaacgcttctctcactccacgctattccgtacaccaaactcctcgccgtttccccgccggtcaccatggcccaagacgctggtgacgctgtgcccccggcgtcgctcatcatggcagagaggcaccttagcctcatccgcaagatcatgccagaggacgccgtcgtgagggtggaggagtcgcggccgcggccgcagtacccagagcgatccgtgcacctcctgtccttcgccatggtggggctgatcccgccattttccaggttcttccatgaggttttggatttctacgaaattcatgcctagcatctcgcacccaacgctgtgatgacgctggccatcttcgcgcacttctgcgagatgttcgtcggggtgcgcagacgatgcggctgttcctgtccttcttcgtcccacagctactgcaaggcgtggtggtgggaggatgctacttctagccccggccaggaacggcggggcagtacattgagagccaccttcgcaagaagtgggaggattggaagacggattggttttacaccgcgctgccggatcatccgcgacttcggctccccgccggccctcccaaacgatccgccgcgtggttggcggttttggaactgggcgaggagtatgacgcagggcgaggagtacgacgcagtgacggatcgcctcaggggcctgcgacccgaaagggaagcgaaaggtgtccgaatctcggccgcgttctcccccgcgcatagggcgcgctaagcgaacggcggaccatccaccagcgggccacaaacgccccgccacgtccgaggctggacggaagaagaagcggctccggaagatagggcaaacggagccgtgccgggggagtttcatcgagcccccgaagtagaccttcaaacgccccctcgcaggtaggatcgctagcgcccgactcggtgctctctatccaccttggcctcttgctcctcccccttctttttcttcttaacgtgatcggggttctcctgtagcgggattccttcctagggggtctcggcgtccgatccctcacaggggtcaaaattcaagcgaccggatcgaccgggacccggccgacccggtgccacggagccttcgcagcaccctggcggggcccacgggccacacggcgggtctggctccgagttcgccacagccgaggtgcaaccagccgcgggtgatggcagcggcggcgctgtaacattggtgagggtgtaacatcccggcctagggcttaataggattaatagaatactcatatcaacaagttgcaacttcttttccggaagccaatctccaaagaactccagggttaagcgtgcttggcctggagcaatttgggatgggtgaccgaccgggaaattcttaccgggtgcacacgagtgaggacaaagtgtgcagaaaagacatgtgttggtctgtgagggcagtctatgacctatgaaagctatcagatgtaagtggacccggcctggggtggcctgggggaaggcgtgttggtctgtgagggcagtctatgacctatgaaagctatcagatgtaagtggacccggcctggggtggcctgggggaaggcgggacgttacaggcgcccccccagggcgatcccgagggcgcgacccacgaggagcgctactcgggaggccgagtcttcctgagggcccaaggcggggggtgacgggggcaaccgttcccctctgcatctggggcgtcctcagggctggccgtgcggaaggggggccgagagcagcccccaatatcgcggggggtctagcagcactccgtcatcccgggggcggaccgcgactttttcttctccaactcccgcgagcatggagccactcctgcaggtgctcgccgccgccgattccaccgtccgggaggggctcaatgcccaagttcaagccctagcggacgagcgggcggccctggaggcggagtgggcacagctcgcggcggaccgcacgcgggttgacgaggggcgccgcgccatggacgacatggtggaggtggggcgcaaaatgcaccaagcccaactggcggagatccaggcgcgcgaggaaacgctagactcggtcatgcgggagacaggaggagtgccaggcggcgctcatcgcttcaagcgtcctggatgagacgctgggcgacatccgcttgcagtacgaggcccacgccgaggatctgggaagacgcccgtggagtcctcgacgcggcggccgcctaagagcggcgggcatcggaggtcgacgcctcgctgcgggctcggactgcggcgctcgaggccgagcgcaaggccttagacgagcgtgcccgctccatgcaggagttcgaggccatgatccgtcgacggatcgaggtcctcgaccgtaaccagcgcgaacaggacgggcgtagccgggaacaggggctgcgagcccgggagttggaggagcatgctcgggcgctggaggagcgtacccgggcactggaggagcgggcacgcatgctagaccagcgcgagaccaccttggccacccacgagagaacggccaccgaggcggaatcctcccttcgcctccgtgaggagaccgcagctgagcacaaccggaccaccctcaccgcagagctttggtggctcgtcgcgcggaggagctgtggcttcgagaggaggcgtgccgggaacaggacgccgcgcttgccgtacatgaggccgaggtgaaccgtcgcgaggtggcggcgcggtggctgggcgagcaactcaccaagcgtgaggaggtcatcgctgggcgcgaggcccggcatctggagagcgcccgcgctgagcgcgcagcgatggcggcgagggcttccgagctggaggctcgggagaaggagttgatggcaggcgggtagcccggcggcgcggagttggtcagccagctcgtcgcggctcaagacactctcgccgacctgggacgcctggtgcagcaccaagccgaggagattgcggccctccgcctcaccaacgagattgggcctggccaactctcctatgccatcgaacggctggagcgcgcggggcgccgggtaggcatctccatgcacttcggctggatgggatggctgcagatttggagaggctggaggaggaggtcggcgaggccgtgaagtcgtcgtcggcttccttggcacgggctgcggtggagctggttctcgcgagccatcaagctcgcgaccccgacttcttcccgtgacgcgcgctcgaggactttcccccggggaccgaggcaagggctcgggagcaagtccgggaggcggccgacgcgatcgtctccagcttcgaggggtcggcccctcggttcaacctcgcgcttgcctcggatgaggagagcgggagcgaggacggtggtggcgatgacggcagcgaggactaggacgaggtggtcagcggcgccggcctcgggggcccgggcactccgtgactatccccgccttttttcttttattttgttatgtgctcgcagtgaatgcttcaaactttaggccatcgtgccatcctgtttgtaaataaagcttccccttcgcacctttacgttcttgctttgtcctttgaatgtctgcggcaagtaaagaaaaaaaaaaccaaagcgaacgtattcaattgactttcttgtgattaagttgccattcttaccccctttataccccccccccccccgggctcgttccggtgaaaagggaaattcgcgctcggtctgtggcacctaggtggcgaggggcaaggccatcgccccgagggagctgcccagcgggtctggccagaccgaggctacgacgaccgggggttggggatggccatgcgtaggcccttccgagcccccagggttcgccgcagcccagggtgcgccccgcgtttaggctccctttcggcggttttcaggtcacccaacgccacttagggtcaagagtaagcgcgaattatcctttgaaccaggacgagccataggaaagagtaagaaagggcgctcaacggcctccgcttaagcggaaaagtttattgctggggaagagaaaagatacaacatatttaatagtgatagcccccggccaaacccgcacaagccgaaggatgtgcggaggttggccgagctccaggaaagcaaaaaacgcgcaaccctatggatagaaatgacggaggtgttcgatattccaggggttaggcaactccgtgccatcctccgtggttagccaaatggagcccgctcggtgaacgccgatcactttgtatggcccttcccacattggtgagagcttgctcagccccaagcgcgactgtacgcggcgtaggacgaggtcgctgacttacagtgaccgggcccggacgtggcgctgatggtagcgccgcaggctttgctggtagcacgtcgctcgcagggccgcgcgccttcttcgctcttccaaatagtcgagatcgtcgcggcgaagatcatcctggttggcctcatcgtacagcgctacgcgaggcaaacccagggaaagcttggaaggtaggaccgcctcggcgccatacactaggaaacagggtgtttcccctgtggcgcaactcggagtggtccgattcgcccacagcactgcggcagttcctcgagccacgaatcccagtgcttcttcaggacgttgtacgtcttggtcttgaggcctttgaggatttcggcgttagctcgctccacttggtcgttgctcttggggtgggcgggcgaggcgaaacacagcttgatgcccatgtcgtcgcaatagtcgccaaatagctcactggtgaactgtgtaccgttatctgtaatgatacggttgggcactccgaaccgggacgtgatgcccctgatgaacttgagggcggaatgcttgtcgatcttgacgaccgggtaagcctcgggccacttggtgaacctgtcgatggcgacgtacaggtgctaatacccgcctcgggccgctttgaagggtcctaggatgtccagcccccagaccgcgaaaggccaagagagcgggatgacctgcaaggcttggggcggctggtgggtttgcttggcgtggaactggcacgccttgcatcgccagacccattcttgggcatcttgcaacgcggtcggcaagtaaaaaccttgttggaaggctttaccaaccaatgtgcgtgaggccgaatgggccccgcactcaccatgatgagcgtcagcaatgagctcgacgccctgctcccgagaaatacacttcaagagtatcccgttggcggcacgccggtagagggctccttctacgagctcgtactgcttagagatacgcgcgagcttctcagcttctgcgcatctccgaggagggagggaacattggacggaacagggtcgtccaccggggtccactccacgatgaagtcatctagaacctggcttttgaccacgtgccgtggttcgaagtgcaggtcgaactcagcgagctcgatggcccacttttcgacccgaccagtaccctctcggttgtacaagatttggccgagagggtaagaggtcacgacggaaacctgatgcgcttggaagtagtggccaattttcttgaggccattaagactgcgtaaagcatcttttgggcctgtgggtattgggttttcacgtctcgaagtgcctcgctgacaaagcagacgggccgctgcacctttcggtggggccggtccttgttgtcaggggcagctggcctggggcgcccgtgctcaggagccccggggggatctcgggccatgtcgggattataggcctcggggccacccgccagagcctctattcctcccacgggggcctcgggaccctcccaggggttcggggcttcaggcaccgggccgtcgggggacgaggggccatcgccaatcaagggggcccctggtcccttttcatggccgggctcgcgacgcgggtcgccttcgtcgcgctcaactataagggcggcactcaccgcgtggggggtcgcggccaagtagagtagcaacggttcctctggccccggggctaccaggatggggggagtgaggtaagcttttagctgattgagagcttgctccacttcctccgtccacacaaacggcccggggcgtttgaggagcttgaataggggcagcaccctctctcctagcctcgatatgaatcgacttagggcggccatgcatcccgtgacgcactgcacatccctaagtttgctggggggtgggcgcatcctctctatcacgcgtattttctcgggattagcttttatgcctcgggagaagactagaaaaccaaggagtttgcccgctggcacaccgaacacacttttcggggttcagtttcatgcgcgtggacttaaaactgtcgaaagtctcggccaagtcctgcaacaacgtgtcctggtggcgcgtcttttcgaccaggtcatcgacatacgcctctacattgcgctctatttgattactcaaagtaatgcgagtcatgcgctgaaaagtaggacctgcgttcttgagaccaaaaggcatagttgtataacaaaaggtgcctacaggagtaatgaaagcagtttttttcctcatcttccctagccatgcggatctaatgatacccggagtaggtatctaaaaaagccaaaaggtcgcaccccgtagtggagtcgactatctgatctatgcgtggtaaagggaagggatccttaaggcatgccttgttgtggtccatatagtcgatgcacatccggagcttgccgttggccttctggatgaccaccgggtttgccggccactctaggtggatgacttctcggatgaagccggcctccaggagccgcgtcacctcctctcgggtgaaggcttgcctctccggggcttggtgccggatgggtcgtgcacccggccgcacggcaaggcggtgctcgatcacctccctggggaccccgggcatatccgacggtttccacacgaagacgtcggagttcgcccgtaggaaggagacgagcatgctttcctatttggcgtccaacgtaccgccaattttggcggtcttggacggatcatcgccaaggggaatctccttgacgggcacctcgtcggccgaggcaagacgcctcttggaggcgcgggacacggaggcctccgggggctgcggctcggtggctgccgccaagttgtcggcgcgctgctccgcgcaggccagggcgaccttcacatcgccaaagacaatgatggggccactggggcccggcatcttcatctggaggtaggcgtagtgggtggcagccatgaacttcaccaacgcgggcctgccctgggcagattgaggtccgccacgttgaagtcgatccgctcggtgcggaagttggtggagtcgccaaagggcaccaggagctcaacatgacctagaggccacgtgtgtcccgagatcacgccgatgatcggcaatgacggctggagcttcatcccctaggctttgagcgcgttaaaggcagccggggagatgatgctgaggctggcccccccgtcgactaggatacttcatcttgacgttgtggatggtaggggagaccacgagggccaactcccctcccccccccccccgagcgagcactatcggatggtcgctatggtcgaaggtgagtttcacttccaaccagtgcgccttccgtaccgcctcgtgagttgggacggcggccaaaagctcacgcctcatggtcttgaagccgcggcgggaggtgtaagcacaagcccccctgtcgagagtggcgacggttccctgaggtatctagaattccagatcctcgctgtcatcggcgggggccttcttcttggcctccctcgctggtcattggcgggggtcgcgagggctttgccctcccgtcgactctgctgcttctcatcggctttccggaaccgctcggccaagtttttgaccgagcagcagtcagcgaggctatgccaataggtgttgtgcaccgaggaccacttgtctgccgatcgaccctcgccggagggagcagtggagctcggcttgtcgccggtggctttttccttgtgcggggcccgtgagggcccatcggccgcaaggacgtggccctcgtcatcggagcgggccgacttccttttcctcctcctatctcgccgcttagagcggggaacggacttggggggagctgcagccgccgcgccggtgccgggggagttccaggcccacgcctcctcctttcgagccaccttgtcctccagctcgaagagcttggcggtggtcttgagctccttggaggcaatcttctccagcatgcggttgtgccgcacgctattccgaaacgcataaacgaccgcgtgggccggaatgcacggaatagtgttgcggacctggtagaagcgttgtatatacggacggaggtagggacaaccctgtagcactgggaccacactaaagtgagaggaggagaagggatgcttattagactttgtggttgcttgatgggtcggatgtgcggttacaggccaaggtggacgggaggagaagtgaggttaatgggccggctcagctatgggctaaagaagaatgggctcaaaatggcccaaggagaaaggagggttttcatttagatttccatttaaataaatgctagaatgatgtttgtattattaaaattagcaatggtgctctgaaaatactggaaaaatttcacatagtgtaattaatcatggagagtttaataaaaattaaatccagccatagcttatttggaaaattttattttccacatttaccttgatttttatgagcctttcttttcttcaacatcgtatacatgtatagctacgattttatattttaattaattacataatgtaaatttttcttaaccttttcttaaatttctcatgttttttcccgttgcaacgcacgggtattttttctagtactattataaaaattaaagatgtttttacctacttttcgtactgtcatctatatctgattctgtttcatatccgcgacgagtccatcgaattttttttttcacgaacgtaaacgtgagtatccttcccgaaaaaaagaaaggcaaacgtgagtatccaataaatatggacgggagctttaccatatcggcccatgaatatttcccacatccagctattcatcagcccatggaatgccttccagaagttgatctaatctccccgggacctggctcgtcactttgcttcaccatggctatccgcttttggccgttgggcaccaccatcaccaccgtaatatatccgatgaaaaaccatcaaatatctctatctcttctctatctctatctcttctctatctctatctctatctctatctctatctctatctctactattataaaagttgaagatgtttttaccggtactttggtacatcatccgtgtatgagtcagtttttaagttcatttgcttttgaaaatacagatccgtatttaagtcgggttttaagtttgctcgctttccaaaatacagaaggagtcgtataagaaatcatttttaaaaaacccgcatgctaacttgagacgattgactcctaactgtagctcatgattttctaaaaatatatatatcggttttaagtttgttcgcttttagaaatacagaaggagtcatataagaaatcttttttaaaaaaactcgcatgttaacttgagacgattggactcctaactgcagctcatgatttctaactcacagtgcatttcttcttaactaaactatataacaatgataagattaaaatagacttcacccgttgcaacgcacgggtatttttttctagtatatatatatagcaaatctattctacaaccctcccctagaataactattctacaccccctcccatgggtcaaccccactttccccacccttcctagggcccaaaacctacatcccacctcagtcaaagggtagtcaaagtgccccccgccgttcaaacgttggtcaaacccgcctactcatttccccccacgcccacctcattactgtcctcgtctcgtaagaattgcgcagtaacaggacaaccattgtacagtaacacgtttgctttctcgcagtaacaacgttaaaaaatagttatgatggatctagttttgttaagcacttttttacgaacatcacggtgcagacggattagaaaaataatatacaacgtgagagatattgctctctaaatattgagatttatacattttttagttcctgtctcgctggaacgacatagtaactcgacggtcaatgtgtagtaacacaactactttccgcagtaacgatgttacaaaatagtcaaatgcatatgtatatgtataaattcatatatgaattacccaagtataatttaaagcacttaacagtttatgtgcatatattaccaacatatatatttacactaaagtaaatgtgtacatatataaatatatacatgtattacaattcattgatgtgctcgctagctacgacttcgacgttggtgttatgtcagaagaaaaaaggactagtttgttgatgaatcctatcagttgttcttgaacagacgtgataaattccttgtgtatgaggttgtccctcatgtgaataacctatgaatatatgaaattaataaacaagaaatcgatacgcaatgaaattttgaatacgtacattgagctctcttgtggtgtagatttgggttgataggcagtgggtatactcgcatacgtagtagccgcacaagttagttccctgggtctgctttgcacactacatgagaaacgacgagagatttaatatacacttatattttaattagagattatgtactcactggaaaattaaacctccggccaagtttttctttccaagtcccatggaccaattgacggaaccgatcccaagccctacatgcagttgcaagctatgattaattattatccgagatctgcatagtagcaatagcaaaattcgtaatgacagtggaatagatgacattacctgtctatcagttgaaaaacctggtcaaaagtagactcctctttattcattgagtcatagacattgactcgcatgcctccaagtcgaaaagtaaaaggacccaatggaatctgcaatttgcgtgagatgatatatgaaactgtacatgtatgtacgggaacgaaatttgttcaaaagtcagtaaaaactcactctgtgctgtacgacagtagtatgaacatcttgaaatgctgctgcgtcaggagatggatgagattgtcctctgtgtcttgctaatacttgttgatcatttcgatgttaactttccgagggtcgatgaatccagtatagtaaacccctcaccgtcgggccctttaaatcaacattctacaacgataaaaggaattattatggtgtacatatatacaaggagctaattaaggaatgaaataaatctaactcaatgatacttacaaaatccatgtgcttagaagagagacatcgtgggcatccagatagtataggtcgaagacatcctcgaacaggatccagagaacatcttctccttggaagaagtctgagtttctgattcttgctccgaacatctgtttaccgttggcgctcatttccatgtaccgttcatggaatcggtacatctgtgttgatagggacttcagctgctcaggcttgacaagcggtttaccgagttcaaattggtatttcatttccgccgttgggattggtgcgcctttaagcagttgatccctagctagtacagtgtcagaaatgaattcttttatgccaatttcttggccggtcaccaacggctcgatctcttggtttggttgctctccaagctgagggactggtttggacattttgtaatatgctttcttaagtgttcgctcatagtccgttatctttaagacctccttgtttgttgtggacattttcttgaagaagtacttcacactcgggtctataggtatcttcttttctagactccgaggcttgaattgcctcttcacttctcctaccacataagcatcaaggtcctctttgttttcggcgagcggctggtcttgaactttcgccttcttcgttgcccttgtgcggacaagcggtggagcttggcaagaccttaacttggaaggtgccgaaggacacggtgcaggagcctgaggagatggtgtaggaggcagaagagacggtgcacgaggcggaggagctggaggagatggtgcacgagacgccgcttgtcgcccaagaaatatgatgtagcgcttgcgccatagtataatgacgtggcttgtgtctcgtagatgcgtctcgccgtctcctccaaggtagtccaactcgaggtcctcgtacacggcttccactagctcaactccgaccctcgagtatccaggtggaatcggcctgcagatgtaagtccctcaagggtccattggaatggccattcctgacgccaccttcacgtgatgagaggttatctattagtaatcaacctaagcagcaacttgcagaatgtacatgtcaaaaatcataaaactacgagcataccttgattgataagttcataaagggaatatgtagctcacatggcgtccgttgcgtgatttcatcgacgaggcaggtggtttcatcctgagcttgcatcgcgtcgatgctctgttatcctacctaccccgttgaggtgcagccgctatgattgcctgaggggctgaccatgacaggaggaatgtacggctggggctcatggctccgctgtgcggccatactttcatccacctttcttgccacctcctcttgcatactgagctcatagttcgataccctatcttcgagatctgcaatcttcgcctcggtatctctcttgctcctcatccaactcctgtacatgtggatgtcctccttgaatccaatcttccaaggaaccacgcctttccctcgcgtttgtcctggatattcgggagtctgcagagcgagcgtaagctcgtccttctctctgtccggtcgaaacatgccctgagaagaggcttccactgcttccgttagtcgattggcagcctcgcgtatctgattgctgaacaccagggagccatcagcggggttcagcgttccaccgtgagcatagtaccagcgctttgatcattccagccatttagagatggccggttcgatacctctctcaatcaagccggcttcgatatcctcccacttcggcactgtgatgctatagccgcctgaccccaggtggtgatggtacttcttcttagcgggatttgctttgtttcggtcgatctgcgcttgcccttgttaccctgtcttgtaagcaacaaagtcatcccaatgatccctgagcttcgggaatgagttgaagttcattgtctgccctttcatgatgcatttcttgtagaggtctcccttgtagttctgaaactgttcagtcactttcttcagagtccactctttcactttgtcttccgtaccctcatggagcgtgaacgtctcgagcattatggtccacagcatctctttctctgaatctgggacaaaacattcaaaatccccgtgtgtccttattctgcgccagtacaccgtgctgacaggcatgttatccctcacaacccaaccgctgtgtcgtacgaaattccaggctgcatctgacggggcacttggtcagctgtctttgtccacttcagttatgatgtgccgaccctcaatcttcttcacagcacctcgttgtccgcgtgccctcttctgtctagcggagggttgacttccactaccctcctcctcctcgttcccctcctcgtttagttactggttcggatcctcgttcccctcttctttgttctagtactggctgcttccctctacgatcgtgtcgtattgtatctgttcgtcatcgcgatcagccatctgttcatacaagaaatatttgcaggcgtatgttatttacaacttatgtcgggtgtatgataaatacaacttactattacaatgtaataacaactctaataatcatgtatatttaccatatgctttattcaaaattgttaaaaattgtaataatcaaatataattaacatatgcataatttaaaattgtttaaaattctaatattcatatataattaacataagcatgatttaaaattgttttaaattataatattcatatataattaacataagcatgatttaaaattgttttaaactctaataatcatacataattaacatatgccacacaacaattggattatatggatcttcaatacatcgagaacaatttacatcgtccaagatttaaaattggtttaaactctaataatcatatattgacttatgtcgggtgtatgttaaatacaacttattattacaatgtaataacaattttaatttgggcacaaacgattgttacaattcaaaacaatattgaatcacgtttgatcgttaatgtcacttgcctgagcaaattcctccgagggcttgataccacttaggcttgagcaacggtgacgaccagtgcttgaccatgtatttttcagtaaaatgcaaacaaatgtattagtctaaattgttctaatataaatgtaacttaaatcgttcgttaacgaggtgtcccgttctatcgttcggtaatgttcgttctatcgttctcgttcgttcgttaacatacgttctatcgtttctatcgttcgttcacgtccgttccactcgttttcttgttcgttcacatccgttccacttgttttctcgttcattcacgttcgttctatcgttctcgttctgtctccatcgttcgttcacgtacgttctaacgtttctatcgttcgttcacgttcgttccactcgttttctcgttcgttcatgttcgttttcttgttcgttcacgttcattcacgggcggcggccggcagaggcagaggcagaggcgcggcgactggtggcgtcagcataggcagcggcagtggccgcgactgtggcacggcggctgtggccgcgtcggcagaggcggcgacagtggtgcggcggctatgacagcgtcggcagaggtgatggcggcggcggcattggcggcggcggcattggcgcggccgcggtgcggggcggcgtgtgcgtcgtttctatcgttcgttcacgtccgttccactcattttctcgttcgttctgtcgttctcgttcgttcacgtacgttctaacatttctatcgttcgttcacgttcgttccactcattttctcgttcgttcatgatctttttctcgttcgttcacgttcattcactggtggccgccggcagaggcagtggcacggcggcagtggcggcatcagcagaggcgacggcagtggccgcggctatggcggcgtcgacagggcggcggcaggggcatggcggctgtggcggcgtcggtatcgatggcggcggcggcggcctgtggcagcggcggcggcggctgtggcgcggctgtgacttccataatgtccttgttgacggtcattatcgaccagtttcgaccatcaatattaaccaaagtatgaagactagctatgcttgcaatgcacaaattccaaataaaatatctacttccactatatactttgctactaacatgtatgcaggagaagcacatataaatgaggagaatcgacagaaaatagacaaacgatcaatcaggtgctgccgaggatcagacttatagatagatgggctgagaactcagaaaagacatgatcaattaagcccaaaattccatgttttggattgaggagcaaacaaggagtcggcctgccaaaaattgggccgtttaggccatatcatggttccccatcacagccgttcaggatggggtttggtgtggacgctctggacgaactcctgatggcggttgtggggtatttccgacaattaccatgctctacaaccgtcatacctgcctataaaaggacctcacctcattcactttcaacacacactcaagcaaggatcaaagctctctacaatgttagtattagtgttagtggagtagagttagaatagttccaagtccgcggaggcctcgaggagttcagtaaaggttctatagcttttcctttcttctttgtaagacttccatttataaatataatattcttctttatacaagtttggtactttattccaatcatagagtatgagtatcagtcttagtttattcataagtagtataatctgtgtggttaaaccttctgggatttgcattgatgctggtataatatctgattaccgggtcataagtctgctctggctaggtcgagagctatggcccgaggacccagatgctctgcaccgattgcaaggctgtagagtaataagtagtaacttaagcatagggtttaggttatcactcatcattatttagaggtatgttcgccgggagagtagcaggccgctgatggtgatagcttagtacggacgtcttccccgccgtttatatttctacatacaatttactggggttggatacacctatgtatcctacttcggttggagggttatgtcaggttgttgtaaaaaactcagcaacccggggtaactttgcgatgcatcgtgagggcatagctgagttacggcttagcaatgctgcattgttaaaggggttatacaacatagtgtatactagttagagtatactaagatgttgtatactagaagtacagaaatggaacatatttaaactactaccacttagctataattaggagatgtaggagttagctaaatcctcagctgtctgtcactctacccttaagcttaacttacccgtgcatagaccttgatgtatacaagtaaagtataaactattagcatagtactctcttatcatatttttccttgggataaaataaatatgataccttggaatactcccgggtgaaatgttgcaatggtatatacgtgtacttgcggatcacatcagtaactgtaatataccaggattatttctagtgctattgctgggaattatatagtaaagaagaaataccaacagctacaaccaggagtaaagaagaaataccaacagctacaaccaggagtaaagatttctttagtcccggttgttctcaccaaccgggactaaagatttctttagtcccggttgttctcaccaaccgggactaaagagacgatctttagtcccggttggtaataaccggttatagccaccaaccgggaaaagatcttttcccgctatttccaagttcttttttgaaccggttagggttaagaaccgggactaaagataataacagtgcttatttattttcattacatatgggtttaacgtaatagtaaataatgcattaaaatgatttaaaatcacaaaattaatgacaaaacatttaaaatagattaaaatatgtagtaaattatgtggatgacatataattaacaaatactagatttataatgcattaaaattctaataatcatatataattagcatatgaaagattttaaattgttaaaaattataataatcatatatagttaacaaacgcatgatttaaaatttttttaaactcttataagcatatataaatatcatatgcatgatttaaaattgttaaaaattctaataatcatatgtaattaccacatgcaagatttaaaattgttaaaaattctaataatcatatataactagtagggtgcccgtgcgttgctacagggaattttgttgatcacgggggataaaatctggcatcgaaaagaaactacaagtcatagttgttttgagattaatttgaaagcaagatatatgttatcattatagaagtgtagtgcaacctttttggcgcataaaacaatctcatggcgtttattaaattataaaaagcaacatagatagaagacagctatgaaaatttgatgatgtcatacaaataaagcacaagcaaaaaatatggaacatccagcatttctagatacggtaattctaatggatgatcacctcaaattaaatcactccatatagttaaataactaccctaatgttgtgcattttttatacacttcagaaaatcttgtgcgccgttaggaatattgctttcacactcattttgttggtacatcagtagatttagcaaaaaaaagtttccttagctcgtcactatcctgcacatgtatttataataagttaaatattggtaaatataaaataatgtattatatgtataatcaatgcctatcacgacttacattaatagccgacaaatgtggttctttatttttccatgtacacatgaagagatgaacaacaaaacccgataaactcctaaggaaatttgatagttagctacccttgcactacagaattaaatttattggtttgaacgagtttttagaagataacttacctgtcgaaaaccggattattgacaaatacttgcctccacaagttgatgtcttcattccacctagagccagggcatgccttcctcatagctttgttaaagtggtcacaaatagttatcagttttctggtgtatctcatgtttgggttatttttatattctggcataagtggatttgggtctaatacatagagtgtttgactttattggtccactatgagcacgataaagcttcgagcatggcgtactggtataagaatctacaaaagatcaactgtcaagataatatataaaacacgaccatataggatcaaatcttagtgatcttaccgctttgcaatgtgaaagtttgtaatgaatttccgaccaactaccaatggtcttttcaagatgtacgttgtcatggtggaccgggtctttaccaaagccactagcgctctacatgatttaaaaaatggttcaattacataagcaataatcaatatattcgatattgtgattgtagataataacatgagcaatagagaatgacatgagcattagattttaagtacttacccaaaattgcaagtccaggcaatgattcgatattgcttctttagttttatgaattgtctggattttttcatacatgaactttcgtatagccatgttgaagcaatcactttccaatggctcatccttctttagtattgattgaagctgtttgagactcaagctaataaagtgcggccttgaactttgtacttatattttcttgtcaatcaaagaaaataagttaatgcatgtttgaattacgtttgtgtatacaatgcattgcagtggcttactccatggcttcggcacaattcatctgttggatgtactgcaaaaggccgctcatcaactcttgtttactcatcgtagataccacggagagtagtgaactatattttttgtttacttctttactttcattgatgtcccttttagagccgaatttctgttgatgactacccaatataacaacatcgtcatcactgtctttggtatcttcgatttgttccctggtcgtcatgaccgccttatttgttttccaacataataatacactcaccccatagtttggattaatctaatatatataatgtatgcacccaataaaattagagatcttggtggagagtttaaataataatattttagtggagaagatgtgttagttaatgacatacatgcatgtatgccttatattataaaacaattgtaaaaagtagttgtgccttatattatggaataaagggagtatgtgaaacaataatgtaccgcacatttctccactacaattaatcaatgttaacattacagtccatttagataaaatgctggctaaatgcatgagattgagtacattcttcaaaaagttgtccaacgtaagtactatttcaatgggtgaccatgtgtattcaacatatttatttattttttttgtttttgcattgttttacaatacatcaatttttttcttaaaaaatatttgcaacattagttatgatctgaatctcatacatttttaatcaagcatattgactactgttcgattggtaataataaccattagtatgaacacaaaatttcattcaggcaaaaactacgaatttacctgtatttgcaggtagtgtatggctgttttgtgttgcaccttgaagtatgcagctgaaaggggatccagtgtgatccacattatcatactgagctacattgttgatcactgtaaatggtagacaccgaggtgtgatcatgtgttgttgatcacttcctgttggaacgtagaacattactttcaaaacaactgtatcaccatattgtttgtgcaagataaatgtaagaatgaagatgttaccaggtccagtcctatcaacgggctgtaataatgcatggtttgatccttgctgcagtgtagaacaatcatttacgtggcatcttcttaaatcatcaacactaacatttgtaatatcaccaagtggagctgcccacatgcaacaatattaaaaactggtttggcatataattgtgattatgtaggaacctttgacataattagtagttgtttgagttaaacctgagtattcatcctccttcaattgcttgtacacacgggccttcattttcctcgcctcctttttctttgggctcattgatgcatacctctctctagcacgcttccttcttaattctaatgcgctgagtttagcaccatcttcttgcagttctgtgcacacatgcaaattatgttaatgttaactctagtaggtagaaaatggaaaatcataacttgcatattttacatttcggattcatactttgcatattttccttttgaggcacattgtttatacgtgattcccccgcgctcgtattagtaatatcggcaaacggggctgagggaggaaatattgcgaaatcaatatgcaagtcacatatgaatggactgaatattagtcacatatgtaaaccgataaaaaaactcacttgattttgttaacgatgttggtgtgaagaccccaatattgttacgttttttgggcgaatccccagcactcgcattattaatatcagcaaaagggcctgagggaggaaatcattcgaaatcagcatgcaaaacacatcttaatgcactgaataatttgcccttaaatagagcgataaaaaaactcacatgatcttcttaacgatgttggtgtggagcccccaatattgttatccatatcttaatgtgtgtaagccagctgtacagtataaaaggccacaatgtcatcatataaattagcaagtctaacaatgctaaggtttagctaactaaagaacctctcaacgaaaaccgattacagcagcctgcaggggatccatcagcaggaagaacaaataaaaaaaacataggatattccattgtgtttcccaatttgtactgaagaaatagcattacaaattgttctgttaaaggtgtttcccatatggatttttctgtacccttgtaactgtaaaagctccaaatatctgtactgcaaaatccatgcatgtttataaaataattaattagtggataaaagctcaaactggaggggtacatgtgcagctaaaatagctcatgcatggagtatccataagcatgtgcaaaacctattcagagttgcatggtaaacaggaatccaaatgctcttacggcatataatttgtacatccatctgttcatgttgaaaattcattactgaaaagtatataaccaattgctaaaggggagctcttagggtataataggtaatgaatcttttgttttgaaacgaggcattgatgagctgcaaagaatatgaagaaattggctcacaaaggcggcacgaaggcggcgcacaagcgcagttccaatccggcggcggtggatggaggcacgggcagtgtcggcgaagactggaatggtggaggagaaccccagaaccaaggcctggcggcaggcttgttacctgcaagaagaaattctctgattagtttgcttttgaacttttcatctgataacagaaagaaaatctgattcagacaaatgtaaatatgatctcagtttggtagatcagaaagaaatgaagaaaaatcgcaagcagatttcacaatagtaaatccacatgaacagatgtatataaaaacagattgtacattaagctgcattgccgtcgacattataaatccactgctttgtatccatgagcaagcaacatataacatctgacattggattatagccagcattataagatcaacactcaaagatgtatcacatctgacttcaagggtcagtgatattgtacgcatttattttacttctaaatcacaaattcatttttcttgtaggatagcggcgcggtggaggaggatggcactggtggaggaggacagtgagggcagcggggaggatggacggcgtcgaagctggtgggtgaggacggcgacaggcggcggcgaggacggcagtgggggagggagctggtggaggacagcgatggctgtggtgaggaggatggcgagggcgtcggggaggaacgatggcggtggctacgcggggcggtcaggggaatcgaaagcagcgcggtgggggaggatgatgatggcggtggtgaggatggcagcaagaatcgatggcagtggcagtggggcggcggtggcatcgctggcggtggtgtcgctggcggtggggcggcggtggcggcggtgacgaggacggagagtgcgtcggtggggcggcgatggcggcagcgaggaggacggatagggcgtcggggcggtggggcggcggtggcgtcgctggcgcgaccgtgatggctgtggcgaggaggatggcgagggcgtcggggagaaacgatggcggcggctacgcggggcggtcaggggaatcgaaagcagcgcggtgggggaggatgatgatggcggtggtgaggatggtagcaagaatcgatggcggtggcggtggggcggcggtggcgtcgctggcggtggtgcggcgaggaggacggagagggcgtcgatggggcggcggtggggcggcgatggcggcggtggggaacgatggcggcggtgtcgctggcggtggggaggcggtggggcagcgatggcggcggcgaggaggacggagagggcgttgatggggcggcggtggggcggcgatggcggcggcgaggaggacggagagggagtcgatggggcggcgatggcggtggcgaggaggacgaagagggcgtcggggcggtggggcggcggtggcgtcgcttgtggggaaggacggagagggcgtcggggaggatcaatggcggcggcgacgctggcgcgaccgaggacggcgaggacgaggcggcgagcgggcgcgagcaagggggagaggatagcgcaaggcgtgaggcgacggatgcggacgggtggttgcgggcgatgcgagcgcagaaggatggggaacaggctagtgcgttagatcgtatgggaggctagtgcgttagatcgtatgggaggatcctaaaacagatgtcagctgttcgattgatgaggactcaccaccactacgaattttttttaaaagtagtagagattaccacatgcaagatttaaaattgttaaaatttctaataatcatatataattaacatacgcatgatttaaagttgttttaaattctagtattcatatgtaattaacataagcaagatttaaaattgctttaaactctaataattatatataattaacatatgccatacaacaattaaattatatggatattcaatgcatccaaaacatatataatcaatacatccaaaacaatttacatcgtctacaaaacaactagggcaatacgttggcggtgacgactgaccgcacgtactttctcctcactaacgttcattccttattatcgctgcgtgagtaaggggtgttttcatttgataggaggatgctagggtcaaccgtcaccgcgaacggaggttgcccgtcaaattgatcataatcctcgtcagtcttatcctcgactccgacgatttttcttttgcctaggagaaccacgtggcgcttcggctcgtcgggccctttccccttctttcctttgctagacatgtcctttatgtaaaaaacttgcgttacatcgtccgagtatccaactgtaatgcctcgagtttcgaattaatatatttcgtggaatattagaacaaacgcacaaaagatcaatttttaaactgttgtttgaataggcgatcaggaaccgtgaatgcgtagagctcgccgagtagtgcaaaatagactataagtttatagtaatcggagtctgaacgaagtcccgaggattgaattaacgtgggccgttcgatctttattagcctctctatttaatcaacagaaaaaaaaaggaaaaggggaacgctagcactagccctagccctagccatagccctagccggcactgttcctgtgcccgtgtcgccgctgctgctctccctgtcgccggcgccgcttctacgccgccgctgcagccggtcaccgcaaccatcgtcatccgtcaccacggtgatccctttctgtttttcttcttcccggtgagttcttgctgctgtgtgtttggttcctgctgccaccgatctgatatgttcctcctggagctgctgctaaccttctattgctgctgctgttggtggtggtgacgatgagggaagagagggttcagggcacaggaagcaggaggggaaaagaagaaaaggggaaacagaagcaaaattggggattttctaggattccacaaattcacctcaaatttgtttttctcctttgtaagggtaactggtcttgatccatggtagttcaattttcacgtgggaatcgatcggattgccggtcgggtgtttttacttgttgtttatgggctgacaatagtattttcaaatctggtattacaccgtaaggattcagattaattgtcctaaataaaatttgtagtcaatgtcgatatctttctaacgccactggtttcgctcgtttccaataaatggtttaggagaaacaaaagaaacagtactgctgaccggatctgttttaactgggacagtaattagatttacttaatctgagaccaatagaggcttaatctgagtttgtgcccaacatgaaagatgtaggaaattttgtctagatgtccgaagttgtattatttgctagattccgttagacggtttgtgaattacgcataaaacagtaataaaacaactatagaatatttaatacaaatcggtaaaaggtttatatgttccaggtctcgattttagtaaatatccctcataactatcattagttgagtattatggtttatgtgtagttttgcttcacatgtgtggagggttctaatgttggaagagtttagtcggattatcgaaggagttaaggtaagtacaagacggacttgtatgatggataaactgtgttacttttcagtttcacttacacaattattattcgaagcttcctattattaactgtgtggttttggtattatgctacatattcatgtttcacttattcatgcttcattcttccgattgtttggtttacattattcaagtaccatgtgtagtcataggagtgcaatttggatctttattcatgatttttgagaagcgctgatcacgctttctcggcttaccggtaatgctatgaggatattcatacctgcccgaagggaactactatcttttggcttctttgttttagaataaagtaaatccaacctttcgtattggtttcttattgcattaaacctgtatatgttttactagttcaatattgtacttgctgagtattcgttactcactcttgtgtttaatttggtttttaggtacctaatgacattgatcggcatggggcgggagttgcacctttagactacacattattgttgcacactattgaaatttagttttaaactatgattatgtttagcataagttttgcgtagaacttataaaggacatttaaagtttccgtccctattttcacgtggaatttatggagctagaatggtttgggttgtgtggattatatcgttgttgagttatcttataattgttgccatggatgtccgtattataggggagactgccgaaatttttaaaaatcttgggagttagtggttttgagtatatttttgtgtggcactctaggtatgtggttacctggggtgttacaccaaccttgttaaggtcaaccattgtcatcccactgttatcaatcattacgccttcactggtcagcctaacccattggcgcctaacccattggcaccgaaacagagggacctttagaggtccatagtcaaattcccatatatgttctcgatggcactgtaatacgtgccagttgtaccatcgtgtctcatggcatcgatacgaacaacactgttatggttcgtactctttatttcttgggctctcgtgtagaatgtgtacccattgatctcatatccttagaatgtcctgatcgagcccgatagtcccctcactaggaaggctagttgttggttaatcgtctctttacccataagatgttgttgcagccacgcggggaaagtatcaatgtgatggcgtgtaattcatgcatcggacttactgatgtttctagcgcgaactagagccaagtgctcctcgtgtaaggagccaccaataaagattgttgcaaaacagtgaaatgtgctttacggaataaattgttgtctacgatcattattgctttccttccgagagtcccctttccccgtactctcccttcatggcgtgattcgagcacctctattgggcgaaggtcttcaataaattctacatagaattcaatgacctcctctgtttcataccccttggcaatgcttgcctccggacgagcacggttacgaacatcctccctccgtattttaatgtatgacgccattgactttttgaccaacatttgaccactcgttttattcaatatttttatgcaaatataaaaatacttatgtcatgcttaaagaacatttgatgataaatcaagtcacaataaaataaatcataattacataaatttttttaataagacgaaaggtaaaacatttgtcaaaaagtcaacggcgtcatgcattaaaatacggagggagtacttctttagaacacccatgtacctctcgaaaggaatcatgttgtgtaggtacataggcccgaaaataccgatctctttgacaaggtgacaaagcagatgcgtcattatattgaaaaatgaaggtgaaaatatcaactcaaagctgacaagacattgtaccacattattttgaagggtttctaatctatccggatcgatgatcttctgtgaaattgcgttcatgaaaacacatagctttgttagtattgcccggacattgttgggaaggatacaccgaattataacaggtagcagctatgtcatcaacacgtgacagtcatgagactttaggtttgtgaacttcttctccttcatgcttattattcgctttatattcgaggagtatccagacggtaccttgatgttctccaagcattcaaacatattttccttctgtgccttgctaagagtgtagctggctggactcaagtaatggcttcgtttctcctttggttccaagggaaggtcgtcgtgttgttccatatgcttcagatcattacgtgcttccattgtatcttttgacttcccatatacacctaggaattccagcaggtttacgcaaaggttcttagtgaggtgcatcatgtcgattgtgtggcggacgtccaagacttcctaatatggtaactcccaaaaaatagagttcttcttccacaccgcctcgttatcatcttcgctctctgtaggttggctgccaagcccctttccaaacactactttaagatctttcaccataacaaacattgctttcccactgtgatgtttaggcttagtacggtggcctgccttatgttcgaagtgcttgcctttcctccgtacatggtggtttgcaacaagaaatcgacgatggcccatgtacacaacatttctgcaatgcttcagacacgtacttttagtttcatccatacagtgagtgtgttgatggtcgttagcgatcagtttcaaccgtcaatattaccaaaataaaggagaactagttattcttgcaatgcatatttatgttaagataataatattctactagtattaggtttactaacctgttgcagagaataaccataaagtggaggagaatcgagatcaaaccagacgataaatcaatcggacgatgtagaggatcagacttatgcatgaatgggccaagaactcagaattgacacgataaactgggccaaaatttacaagtctgtggatgagagcagtagaggtggccacctgccaattttgggccaggccggcccagcccatggtttggccgaacccaccgcggcaccatttgatccaaggttctcctggacggctgagatcgactccctatggcagttggagggtattcccgaccattccaaccgccacaaccgtcattctcaagctataaaaggaggtctcattctcacttcctccacacacaatccaagcaaagctctctcatattctctcaagtttagtttagtagtcttaagctagtggagtaggaatagaatagaaatcggagtccggaagccttcggaagagttcgggtatggctctagtagctttcctttcctcttttgtaagctttgtactaatagagtgcaagccttgtaccccttgtttgactgcccggatagattgttaagtgtaggccaatcgttgatggttacgaacagcagcactcgtaggttaaattcctcctgtttatcctcatcccacacggggacacctttcttccatagcagtttcagatcttcgaccagtggtcttaggtacacatcaatatcgttaccacgttgctttgggccttgaataataatcagcatcattatgtacttcctcttcatgcatagctaagggggaagtgttggcaactttttgtgacaagttgacaatcacgatcgtagcaccttatgccttgcggtgattctagagtcgccaaccacctcgatctagcaaaaagctaaatctagatgggttttgataactaaaccagctagcggagctgattctagataactacccgtctcgtgggcaaaacggaagattttcaggacaaacctacaaagaggtgtcgcactctcgcagcggcggcggacagtttatggcgcaaaacgacaaagatggactaaaactagggtaaagtagaaaacatagtaaaagaacgattcaagtagattgtattcaggggttttacaatgaaccggccttgtcccttaaataggggttggtcttgccctctacaggccctcctccacatccaatttgggatagaaaccaaaggaaacacgaaacatgccttcccgagcaaggaaacccgagacccaacgaaaacagacttggactcgaaccctggcggtctgaccggccctactagccggtcagaccacccacacacccgtggtctgaccggccctatgaaggaaacccgtcactttccaaactttggcaattttctcctatttcgtccataggtgccaaatttgggtgtaaacacatgccccctacctttataatgaacatcgtgaatctaaaagcatagaacatgttgtctgaggacgataatccaattaccggccacgggacttcctaagcatctaaccaaacgctagaaaagtatttctttaagtatttcccattgattgctctctaaaaacacatcttgaagtgtctccatctctttcaaagtcttcaaacgcttgtcgatgacatcttcaaaattgtctcccatcaaggtcttgtaatctttaactgacaagtcgtcttgcttgaaataccgaagagagccaagatttacctcaactggcaaaacgacaatttcaacaatgttttattactcgactcggcttatccattagcctgagcgtagtaaagagaagaactcaacaacttaatatcataagattcggcaaaacttctcacttccttggacataaaagaagctcctttaatgtttgaggaataccgaatctattctcaatatgcttcaaaataaagtcaattacctccgtacaagtaatattctcgagcggcacggcttcggcccacttagtgaagtaatccattgcgactagcacgaaccaatgcccttttgatgacgaaggataaatttgaccaatgaaatccaaagcccaacctcggaatggccatagtttaatgataggattcaacatggcggtaggcgctaattgaacattgccgatccattaacaaacttcacatcctccatagtattcgaaacaatcactttcggccaataaaatcctactcacctaagcaaccaacccatcctacgggccgattgatgagttccacaaattccttcatgtacttctcccatagcaaccttagattgataaaaaaagtattccatctatttttcggtgatataattctctatcaagcaaagtgtatttgaatgcttgccgccgaatcttccgatcaaccttaagactagggtctttcaaatattttatcaaagaaatccaacctccttattattcctgggcacaaatgtccgaatttacaattcatttggcctctaaatcaattgtgacgtgccccccagctctctgcccacaatcggtcggaccggccacgcaatgccagtcagaccactccatctacccggtcagaccggccatgcaaagccggtcagaccgtaggtcaccaccggtcagaccggccgtgatgtgccggtcagaccgcccccaatctaaaactttgccaatttcgtccaaacttttgaaatcaagcatcggcttttttaatatatagcttctcttcacattatagccagatgctttgtgtatcaaattggaccaaaatttcttctctctagaaatataaaaaattgtaatatccaactaatatgtctagatgaatactaattcaagtggcttttgaaacaataatcatcatggcatcaaaacacttagccaattgaagtatgatcaataatgaatcaccaaagtcatatgtaccaaatgcatagattccaataaactacaaatgtaagtaatcggcttgagcatgtatgcaaaatattaacaatgccaatgtccctaaagaaaacaactctagagcaaatcatcacattgaccattgacattagccgaattactaataagcaagactttcatggtgtaataaatatgaaatctatatcttatatggtgatccataaaaacacatacgatttggctttaaataaatatcaaagactcatgagccaaatcatacttcaaacaaattatatgccaacctaccaattccactacttagaactggcatttgcaacatgtatgtataatatgtatttgataagcaaaaacacacatgtgctagatagcaagcaatgttctaataacatggcatacgcatataatatgataatgaacacaataaacccataccttgccttagcatccaacaaacggcggctcaaagttgtgatgttgtatccatcgccgttcatcttctcttggttccttcataagcataataatgtcttgccccccaagcaaaattggctttctcgactgcacgatttcgaaggcaagatgaacaccgcacgaacacccacagcatcatgtgaaggagacttatctctaatgaccggtgattcttctctcatcaaattagatttgttacttctatgggaaatcaccggtctcttaacttttactactttaggtctccacactcgcttaggtgttgtttgaggctctaaattatgatatgttttgttctccacatcttcggcctccttttcttttcttttttttgagagcgagataagccgaaaggtatccacttcggctatggttgtcttctaggagctatgcaatgattcttgatatttttggtcgaagtggaagctcctgtgctgctctcatttttcccactcttctccattgccccccagtcagaccagcctttcggcccggtcagaccgaccacaagccgtcggtcagaccgtctaggatggtcaatcagaccagccgtagtctggcggtcagactggccagctgtcttggttagaccgccaatgttgacagttacggcgtcggcttcagtcttctccacttgtatagtttccaccgcatctccagtaggtacatgaacatcttgagactcctccttgatagcaacgacctccggagctttggcttctttcttcacccacaccttcttcacctttttcacctttgatccaccagaccgattcttttgtgggaaacggtcttgtcttgagttaaatgaatgacttggtactgacctaggtgattccttccatccttgatgacacagcataggtggttgaggcatccatggcacgtaatacataaaaggataaccaaacggtgacattggatgtggataccatggcatcacaaccggaggtttgcatggagtttgtatagttgatgactccgattgctttggtgtttgaccaaatcttttcctgcgacatgatcttggtctttttgaatcactagtttgattattaaatcgttgactggctaatcctttcttgtatttagccataagcatctcaaaagtgagcttcggctttttggtcttttaggaactagatgactcatcctttgcaactttatgatctttggccttcgcattattgatcctagtcttgggccgaggatccccaataataacatttttccctttctttttgtcaacatcaataggactattagggaaaggatcactaaaaattctggtcttaggcatagatgtaactgaaatagtttcacaagtgaccaatgaggaatcaatcggtctttgctccatcaagcttgcatctttgaaataattatgaaactcatgctccatttgtaaccttgtagaaattgaattaggagcaagtaaactataccatgtagatgcaaagtttgacaaagaaagaggaagttaattttaacttaagcaaatcatcactaccggccttatcacactgttcaataaattggccaatatactccattgttgttctagcatcttcatctgtgaattttgtgaagttgggcacctcaaatccttgcgggtatgggaccgaatctacgtgttcaggatacgacctttgatatatatgcatagctactttgaattctatttcactactatcccgtaagacattatcatcatcttttccaacatccacatgaccgatttgtgattcggtcttaggtgacaatgctatttcactttcatttgtgatgcaatccgaaccgtcatttagttcggttatatcttcaatggtgttattgtctaaactaccaacacaatccgaaccatcacttggttcggctattccatcattatctaaactagtaatacaatccgaaccgtctcttggtttggctataatggttgttgcattattatccaagctagcaagacaatccgaaccaacatttggttcggctataatcgttatggcatcattgcacaaattattaacacaatccgaaccatcgcttggttcggctatacatgatattgcactttcatctaaactagcttgtaagctattgtcatccactcggcttttctgagcctgagcttcatgcaacacatgatcaacatcaagaaatatctggccattcaatttctctttaatagaatcaagcaatccatcatatgcaatgtcggccaaatctttgtcagttattttcaaactaaaacatcggtttttaacatccctaaatctcttaatatattcagcaacagattcattgtatttttgcctaaccaatgttaaatcagacaacctaagctcagttttaccagtgcaaaaataatcatgaaatttttgttctaattgagcccaggtaaaaataaaatttgccggtaaagaagtaaaccatgtaaaagcagtaccaaacaaagataaaggaaacaagcgcaatttgcatgtatccatattactagtctcaccacattgcgcttagaattgatctacatgctcccatgtggtcttactatcctcaccactaaacttggtaaattcaggaattctataaccacgaggatgtgggatcatgtcataaaaatcaggatatggcttttgatactccctagcacgatcctccgcttcaaccccaaatgtattcctaataatgataataattaactccttcatatctttaggcctatgtggatctggtggtgtatttggtggcctaagaggtggttgttgcagcgcaatataattatattggccatacctagtatcgggaggatatcccctattagtatcattgtaggcattagggatatgtggaatagcatgactaacagtattaacaggtgatgaataataattaaaatcagtactgctagtcgtggtatgaaaacctggagaaactcctagggaaccggtctgaccggcccatggcctggtctaaccggtgataagtggtgcgatcagaccggccacaagaggtccgatctggccagaatagggcacgatgtgaccggctatggtaggcacggtctgaccagcataggatgcggttagaccggtgtcacgaccggtcataccgttagctaggttttgcatatagccgattcctgtgtaatcagctgtataattacccattgaccccatagcattataagcatattatataggagcaaaactagaaatagcatatgcatctacacaatgatcattaaccttttgaatagcaaagtatgggttgggtgaatcagagtttacctttagtgaaactagtttccttttatgacgtcttgatcagtcctaatgcattgtgtagtaatattgttgtaaccgttcccactcgtcatagttgatgaagaaattccttgattaatttcggccatatagcttatagccgaaatctttgaccgaataaattaatatacggttttgatttccttaagtataacaaacgtgtgtgcaactaaaacagaattgcttgtctcctcgtgtgtaagcaaaaattcagaaaatcgatgtctcacactaacagccgaaacaatatgaatcggctttgatttttttttaattctcctcgctagatgtgctaatgtatgtactaacagaaaccaattcagttttgcctactgtatgtagatcgatcggttctggtagcctgatctttttcttttcagtatacgtatagatagcaaattgaataagattaagtttctaattttcaggccgtttacagcaagatgctgccggctgcttgttgctgtctcgacgactcgacgtgcgctcgtatagatcggtttcggctgtatagccgaaacactcggctagatgggaaaacaatgcaacgagggcaatatatagatagattgatttcggccgtttggccgaaaccctcgatttgacgaaacggctagatcaaaccaaattcggccgtaatatggccgaatagatcgaatcctagtggagtcgccaaaaattgtgttggcaacttttttgacaagttcacgatcacagcaccttatgccttgcggtgattctagagtcgccaaccacctcgatctagcaaaaagctaaacctagataggttttgataactaaaccggctagcggagctgattctagataactacccgtctcgtgggcaaaacggaaggttttcaggtcaaacctacaaagaggtgtcgcactctcgcagcggcggcggacggtttacggcgcaaactgacaaagatggactaaaactagggtaaagtagaaaacatagtaaaagaacgattcaagtagattgtatttgggggttttacaatgaaccgggcttgtcccttaaataggggttggtcttgccctctacaggccctcctccacatccaactcgggatagaaaccaaaggaaacacgaaacacgccttcccgagtaaggaaacccgagacccgacgaaaacagactcggactcggaccctgatggtctgactgcccacatacctgcagtcagaccggccctactagccggttagaccgcccacacacttgtggtctgaccggccctgtgaaggaaacccatcactttccaaacttttgcaattttcccctatttcgtccataggtgctaaatttgggtgcaaataggaaggttgtagatacacatcgtaataggccaagtgctatggccgctgctcatctctccaaaaggattcatgccatccgtacttaaaccgaaccttatgtttcgtgcgtcttctccaaagtctttaaatgttctgtcgatgttttgccactgcaaaccatcggcggggtgtctcagcatcctgtcctgttgatgttcttctgtgtgccaatgcatcattctagcatgccccctgttactgaacaaacgacttagccgtggtattatagggaaataccacatcaccttagcaggaattctctttttcgttggctacccgtcaacttcacctggatcatctcatctaatcttgtatcatagtgctttacatacagggcatgtttctaggttctcgtactcctcaccgcgatagaggatacaatcgttcggacacgcgtgtatcttctgaacttccagtcctagagagcagactatcttcttagcctcatacgttgtctcgggcaatttgtttccctccggaagaatgttcttgacgagtttcaataaatcgccaaatgccttgtcactaacataattttttgccttccattgcaagaattctagagtggtacctaactttttgtgcccctgttcgcaacctgggtacaacgacgttctgtggtcctcttataaaggctccaatttatgggctgccttttcacttttgcagtcctccttggcgtcctgcagcatctgaccaagatcatccgcaccatcgttatcgtcaacatccccgtccacccgcccattctatttccttcaaatccagcgtactgagcccagtccggaatgttcccgtcttccacttcctcttctttcatttgaacccctagctctccgtgcgatgtctaacaattatagccaggcatgaaccccgactcaaacaagtggaaatgaatattccttctggttcttgcacttattgcacgacaacaaataaaacccttatgcttgttagcatcggccgctctcaaaaaataatgcacgccgtcaataaactcttgcgaccgccggtccgcgtacatgcattgccgatccatctacatgaaatgcaaaaaaatcgtaaaaatattcaacgaaagtgaaacccactaaacagtcatacaataatgacatatcattattcatacaataattataaaataatgccacaaattattctttttgaaattatttttaaagttttaaaataatatttaatgtgttgcacttcttttagttttcaatttagtttgttttctatttttttagattaattttcaatatattttccttctcaactattttataaaaactttttataaaattgtaaataaacaaaatttcaatatattcttcttccctacacaaattttctctctcatcaacttctaacaaagttttagagacaataatgtgtataaaacatagctccaaatgtaatatgacaacaaaaaacattggagaatgaagttgctaatcagacacctccgatttgtatataataactaaaataaattcacaagaaattttcgcatgacctcccctcttgtatgaagaatttcgaagcttggctcgagctggaggaggaagaagacatatataaagggattgatctttagtcctgcttggtaacaccaaccggggctaaagacccctgggatctttactcccggttggtaacaccaaccgggactaaagttaggatctttagtcccggttgggagtaagatcgcaggagccctgagaacatgtgaaccggactaaaaatgatcaaatagtcccgttgctcttataaaccgggactaaaaatcctttttagtcccggtttttaatggaaccgaaactattgtggatttgggtcgaccggccaaagatggtttctccaccagtgatattattattattcgttgataaaattttccatgcattcttagtagataaacccatcggactcttctctaatgcaacaccaaatgccatgctctgttcgttttctgaataccaggcagatgcaacatctgaaatgactaacagaatcaccaggtatagtgcagttgagagctgatttcacacactctatgggaaaaaaaactgccgcgctaatgatccacaaatctaggaaagtgaaagcgttgggaaacaaaggttcaaatgtgtacgacaatcccactcctgacgatctcagccatctccttgaaatccaagttttcacccatcacccataaacccctgcatcgtcggctaggcagcaagtgcggcttaacattaaaaaaggcaggaaatgaaggtgcctctaattaatattaccaactgcatatcttatcttactataaagttaccccccactaactcattaagcttaacctgcaaagatgccacatcatcatccactaattaacaagatgctacatcatcatccattagcaatcatcacatttaaacatcatgcaaacatgctatatctttatagtttttataatttaagagcttttcaaatacaaacatgttaaattatcatccaacataattcacataatgtttcaatgtatatctttattatgttttatgatatcctatatacttcatcctcacttagttagtacttaaataattaatctatagtccaaattatctttctccttttttcctctaattaagtcatatcacatcaattgtttttagcctttagatgattaatctatagtccaaactatctctctatttttcttcttccataaagtcatagcatcttattttttacatttgaatcaccattctacatactatttaaatttaaattatcataaaccacattaatttacttagtctgatgttatctagctatcttacacgttattttttttattgttatcatactaaattcccgcagcaatgtacggggttttacctagtatgtactataaacacgaccaaatatttctctctctctctctcagctgtaaaaatctgaaattggacattggaaaacacgtggaaacataacattatgacctacctggaattaattcagtgccagaagctataagaaattttccaatgtatattcagtgcaagaacatcaaggctagaagcagaatatttaggaatctgccacatcaaaactattggcatcaggagatccattatgaactgttagttgggatctccggggaatcaggaacccactccgctgcatgcgccctggtcgggggtgctatcctatccatggctgtgagcccctctcatgcatcgctacaataaaaaggggagttgaccgggcacgcgggccaaggtttttcaccatgcacttgactccctacaaaccctaaaactgccacggatccgggaaagtgctgaagagaggggattcctcatggtctcaccatcgctaccgccgtcgttcacaccgacatcaccgagctcaggaacatctacacgccaccacaccctccccatggctgtgtcaagctccaacaccgatgccggtatgcctttctctccctctctccttccctgttcactctctaagacaatccctactactcccatgagctagctagttaagcccctagatccgcacctaggaaaccttagtttctaacaatggtatcagagccatcctagaagtagatctagtggggttaggaaggaggaagaagaaggggtctcggatcccgaagaatagctcaaagattgaaaaaaaaagaaagaaaccttacctctgccaccgccggtcatcgccgacgtcgtgcgggaagtacaccgccgtcgtcggtcgttgccgtcacgcgtgggaagtcctccatccactgccaccgtgaaaaatggacatgattctgccaaattgaatgaacaaggtcaaaaaacgccctcatgctccacctagaaattttcaattctgaagatattagcttttggaatattagtgccaatttgaacaacacaaggagtatggtcagagactgatcttgctaaaggtttcaccaaagtatttggaaactttaaagtccagtcagtggaagtgaaaaaccaatctagctgctcaagtaagggctactcaaggtaaaagccctacccttaatgggcaattcaacaaggctaagatcactaatgatttcattaaaaaaatatcattcatgtcagcaccaggcctattccttttagtgactgagcgataaaaatagacatctccaagaagcaaccatagctgatcgaccgaaatattgagattatgaagccacaacacaaagtcatccctctcactcccagcacagggaccataaacagacacaagagaccaaaccacaccaaagtgatttgatgtaaatttaatctgaactgcaaatctctcaacagtctcaacaggaccataaaaaatagaaatattccaacttacaaggatgcccccagaagcatccacagaaggagaaaaagcaaatttgttaaatcccttaggatcaatttcttaatgtaagaatgatgaaaagtactcctttttgtctcttgcaaagaaaaaattgcacatccacattcttccaccgtattccggatggctaaccacttatcatgagaattcagccctctaacattccaacataaaacattccagtttcttagagcagcattcttttaaataggaagagtagaaacattaaatgaggaaagatataatccaacctccaacaaaagcaccaccccatgagtcataggcagtatttgtcacaccttgaaatttcccctttttccttagcctcaaatttagtaataaatcacccgaagaaattatttaatttaacctggagctacctctaattcaccaatgcaattaataagtggaatttgcatggtggatttttttttagttcctcgtgtttaaatacaataacatgatttttagtggaatttatcaaaggaggcaattttaataaatccaaagtaatgatcgagactaaatttaattaaattccttcttctccctgatgaggatgttaggtcccgctcttccgacaggtattgataaacagtagatttgcacggagtcgtgacacaactcgatcttgcttctaaacgaacacgctactgagcctcgcaatcgtagcaccacgtctcctctggttatcaaccgtgccgaaacatagttgacctcgccaagaagactaatctctgtatgcgaatcaaagaacacaagcaagaacaagatagattgcaacacaattgcatatgaatgattaagcactcgaatttggggttctacaaaccgatctagcggcgaaactgttcttgacagattaatctaagaaaaacccgactctaaacgatgacagctactgattaagtatgattagggacgtcctaaggttgtcctagggcaaacaccaccttgggctaagcccactacacaattataaggcccaaaacataaatcagattcggactggatgagatacatggcttgctttgcagattccaggcagctcgataggaatttttatgtgggacaaaaaccatctgaaagtagactccataagctttccaacaagtactcatgggccccaaaattccttctatattagcggataggtccatttgaatttgattctattaggaggcccgaatccgaatccaaaacgtgtataattttatctcttgtcttctttggaccaaaagtgacgcggtgaggtagaagtagacttggagaaggtcttgatttggtccccaatcaacttctttgattatccatgcatttgttacgctcggtctcttttccttcgcccaagcaagtacctctgcaaacaaaaacacacgaaactcactttgtagcaacgtttgttcaaatatataacatgtaaatctaatatagaccatatgcacctttggttgattaatacataaggtagtcatggttatattcgagctagttgtgtcctcatcattgagccctcgaggagttgtcggtattggctatggtactttcgtcgtgcgactcttttacgaatggttttatcagggcatctaagaaggttccaggttcaagaggttctcttttggatgcccgtcgtgctaagtcatctggttcgatgttatccttgcgataaacgtgtggaacctcgatgccgtcaaagtttcgttctagtttcttgacttcagcgaggtaattagccaactcgggattggtgcatttgtaatccttctacacttggtttgcgactaattctgagtcccctctcacaatcaatcgtttaaccccgagtgcaacggctgctcgaataccaatgaggagtccttcatactctactatgttgtttgttgtgaggaagtttaggtggattgcatgtttgaattgatctcctgttggagaagtcaaaataaatccggctcctactccttggttgttgagtgcaccgtcgaatgccatggtccatgtctcattatcagtctggctgcttgttctattcttgggaatagtctagtcagctacgaaatcagcgagaacttgggatgtgatggatgttcttggcacaaagtggacttcaaattgactgagctcgactacccactttgcaatgcggccaataacgtctttgttcctgacgacttctcccaagggaaaagaagagacaactgtgactttgtgtgcctaaaagtagtgaccaagcttccttgatgtcatgactataacatagagcagcttttgaatatgtgggtacttggcttttgcatcatggagggcttcgcttacatagtatgttgggtgttgcaccttttccctttcgacgacgataatagtacacacagaatatggtgtggcagcgatgtatagatagagctcttcgttaggttgtggggcaacaagtacagggggatttgacaggtagcgcttgagcgcgagaaatgcgttctcggagtcctgagtccactcgaatttgtcttgctttttgagtaaagcgaagaaaggctgtgctcgttctcccattctggctatcctggctacgaagcggctaagtactgctatacatccggtcaacttctacacttctttgagtctggtgggtgatttcatgttctcgatggccttgatcttctcagggtttgcttctcagatggtactccaaacgtgcacttctctaggtttaacttgaggcgatgtcgtcggaggttattgaatgtttctctgaggtcatcaattagtgtgtcacgcgtctttgtcttgaccacgacatcatcgatgtaggcctcaacatttcatccgagttggtcaccaagagccccttggatctcacgctgatatgtgttgcttgcgctgattaatccaaaaggcatcttggtgtagcagaaaacactaaagggtgtgatgaatggcgtcttctcctcatcatcttttgccatgttgatttgatggtatctggagtaagcgtcaaggaagcttaacaactcgcaaccggctatcgaagccaccaattggtctattcgaggaagagggaagtaatccttgggtcacggcttgttgaggtcggtgaaatccaagcacattctccatttcccgttggctttacggaccataaccgggttggcaagccactctgggtggagtacttctcggatgaagccggccttgacaagtttgtccaattattctcatatggcctattttcgatctggtgtgaatctccacagtttttgcttgactggcttagcatcaggtcgcaccatcagtttagttgttaaagtctttttctagacaaaacatgccaatgcattattatttttagagtaaagtgtattggtgatccttaatcttgtagggttgtgtcatctaggtcgctaaactcttaaaatgcatattcaggttccagaaattgtcaaagtgtatcatctaggtcccaaatcgatacatctcctctaagatcctacgtggcgctgatgtgacatgccacatggacgtgacgtgtccttttcttttttttcttcttttatttttctttttcttttccgttttcttctcattcttctttttttcctttcttctacccgggtcacggagaaaggagaataaaggggaaaaagataagaaaaaaagaaaaaggaaaaaatttaaatgggtaacatttgtcagtcaaaataatgccacatcatatccgtgtggcatgccacatcaacacaacgtatggtcctgaaggagttttggcgatttgggacctagatgacatactatgacaagttctggaacttagatatgcattttgagagtttagggacttagatgacacaaccctataagtttaaagaccgtccgtacactttactcttatttttatacaactcaggatgcacaaatgcacatgctccctcccttctaaaatataagaacgtagtatcagataggacattttctattactacgaatctgggcaagtaaactgtattttgggacggttctatattcttatattttggatggaaggagtattacacttgtgcaggcgtgtctatttgcttataacttagaaaatagcgtttaagtccagaaactgaactcgtctcatggacacattccattgcatctaagtactctctttatcccataatataagggattttagatggatgggagtatggtcttatgggacacttcctagtgttcatattgatactactagaaagtatcatattattattttggagagagtgatttagtgaattgggcacattattattttgaaggtatttcaccggcgctaagaacaggaatctctttctgggcctagtgctttttctaacactgtcatctgccttgaagcaataaaactaatcactaatccaacaaagataagcttaaaaagaaacagcgacaacggcagctctgtagtgttggtaactgtgtgatgttactgttgggataaccggatagttaaagataaaatccagatgcccctccaaatagattttacgtttttttactatatatgtacatccttttcctcttcaaataaagttttctctcgaattacttatccgatctataatccgattacaccactaagttcgttacaattaaatcttcataacaagatcttacatgattatattacgatgaaaaaatatttatatttgtaaattactaagttacttttatcacacacacacacacatatatatatataagttatttttagagttgactaaattacttcttagacatataaaagtctaaaagtaatttacatatattataaaaataacttaaaacaaaacagaagtaattttgtcacgacattagaagtaaattcgttgtagggataaaaatatgactttatctagaaattaaatttaatcagcacagatcaacacacataagtttaacaatttttaaaagtaacttcaatgttaattggaagtaacttttgcatggttcaaaagtaactctctgtaaatctgtttaatcatcaattgtttttttcctttcatttttgtttttcatgtagaatgagaaaaaaagatactattgtatttttcaagttgaaaggagatactagatagaatacaaactagctaccactaactgtgtagtcacatccaattaaaaaagacattcattaaagttaatttctttttgttataaattacttctataatatatgtaaattacttttaggcttcattgaatttacttttacatgtctaagaagtaatttagtaaaatctaaaagtaatttagatatattataaaagtaatttataatttttcattaaaatataatcatgtgagatcttgttataaagatttaattgctataaacacaacggtgcaatcggatcgtagatcggataagtaatttaagagaaaattgtatttaaagtatatgtggataatatctttcataaatggagtggtagctggtttagacaaactagctagcactagctgtggagccacgttctaaaaaaaggcatgcatatagtgccatgtagcagctggactttttcatgttttttcgtgtttagccgttgctagttaagacaaaatcgagagtagtctccaaaatagatttcaggaacaagtatattagctcgggctgctgctgcaggctaccgcttggcttgcgtcccttttgacgcgctctcatctctgtcctcccttctcttcctatacaagtcctccctttattcttcttcttcctcccctttcttgtagtagtacccttgtttgtgtgttgagccgtggctgtcaccgggtcaacacactaccatttcaacctctttgccctgttcaacaccagctcatgcttccattgctagtggtataagactcggattttccctcatgaaccatccaaatattcagtcttgaagaaggaggagaggggagggggaaggcgatgaagtctaacaggaacctgaccaggggagacggtaggaggctggggaatgcggcactgatagcgtttatgctgggatccctacttgtgctctccctcgtcagggcaaggttctcccccatcggtatgctccgctcttcttcgtcggctcagcttgactgcctttcgcatccggccggccatggtggtctggtctgctttttggttcttaggctgccggtgatttgattactgatctaagctgtgttgttttttcttatcgtcttcctgctgggtgctgcagggaagccaggggaagccatcaaaacagaggagcaggaggcgatgaggaaggggagtgtgaagatggagaccctcgaggccgccgatgaggctgcagcatcagctggtaagcacgagtttcctcctctcctgcatcttcgagtgatatagatttattagtatttcgatttagtagcatgtacggatgtagggagctgaccgtatggatttgagagtaaatttcgtccttcatttatcaagattgcagtattgcactaaatcttctcccgtttccgctctacggttcgagctctgaaattttaggccatttcttgtaacttgtgcgcacaaaaatgcatcaatgatttatgattcaatgtccaaaggaattacggaaattagttcagatctgaacaatttgggtggcctttaatgtgcagaagaggaaataaacgctcaggggtagctactattgatatttttgtccgtctatttactcgcgatttttttttatttttttgctgcagcagcagcagaagaggaagaagaaacgcagcccaaggctggagacaccacagctggtggcggtggcggtggcgcaagcagcgcagctgttgcagcagcgtccaccacggccacggaccacctgactaagccggtgtgttacgagtcaagccggcggtcggacacgtgcgaggccaccggcgacgtccgcgtgcacggccgcagccagaccatccacatcagcccactggagcaggagtggaaggtgaagccgtactgccggaagcacgatgccttcgcgctgtcgcacgtcaaggagtgggcgcttcggcccctctccaccgccgacacatacccggcggtgccgcattgcacggttaacagttcggccaccgcgttcgtgctctccaccggcgggttcacgggcaacccgttccacgactacacggacgtgctcatcccggcgttcatcaccgcacaccgcttcgctggcgaggttcagttcctggtgagcagcttcaagtcgtggtggacgaacaggtacatgcaaatcttccagcggctcagcaagtacgaattggttgacatcgacaatgatgacgaggtccgatgttaccggagcgtggtggtcgggccgacgttccacaaggagctcggtgtggacgcgtccaggacgccgtcggggtactccatggtggacttccgcacgatgttgcgtggagcgctcgggctggagcgcgctgtggctgagcccagcggcgaccggtgggacatccggcgccgcccacgactgctgatcatctcgcggcgcaactcccgtgcgttcctgaacgagcgtgccatggcggacatggccatgagcctgggcttctacgtgcgtttgggcgagccggacatcagcacggacgtgtccaagttcgcccggctggtgaactcggcggacgtgatggtgggcgtgcacggcgcagggctgaccaacatggtgttcctccctgccggcgccgtgctcatccaggtggtgccgtatggtggcctggaatggctcgcccgcggcacgttcaaggagccggcggccgacatgcagatccactacctcgaatatatgatccagctcgacgagacgacgctgagcgagcaataccccaaggacgacccggtgctcaaggacccctactccatccacaagcagggctggaacgctctcaagatggtctacctagacaagcagaatgtgcggccacatttgggcaggctcaagaacactttcatggaggccctcaagctgctgccccatgggcacaccaactgagtaacatacttattgatcatggagcccaggtaattaccaggaacaccatatcatgtacttaatttgcgtgatcggtcgactagatagtggttgaagatgctaggttctcttcctttggatgtaacaagtctgagtttcaagggtggagtttctcattgatctgtaaatgcgagttaggaggcgcattccctcctctctgtttttctgctctcttgtagtagtattttgggagtagtactacaaaatgtagtttggaggatgtggaatctaataagaatggagggattgcatgggatcagatagaagggtgttggtgattgaacaagagaagagaagagtaccaaaatataatgctatctgttgttagatgtagtagtgtgaaatgtatcaccgatggtctgttttacactatgggtgtgtttagatggtggagaagttggaaagttgggagaaagttggtagtttggagaaaaagttggtactttacgtgagtaggaaagttttcgatgcaatgtgatatgatggcaagttgggaatttgggtggaactaaacacggcctatgcttataaagcgggaccaacgggttacaacaagcgggggttaagggtgaacgacgacgacaggaatccggatgccaagaggttttgtgggagctcactcaccaattcaccatccaaatgcattcctcggtccctgttcttgtaacctgtctcgtctttctggatcgctcttgacacgggctgcacagggattaggatcagttgtagtagttgttatagtgactgcaactttagctgtagccgatttgagtcgttcaaaaggaccggaaggttagctctaaaggcaccaacacgacccaacctgacagactgtagctagccttcaatgtcgttttcttcttcgtctatctttcttcttcctattatcaaaagaagttctcttcttcctctcaattcttggcaaccatgagatctccatgcaaaccatcagtaccgctgttccactcatcaagaggattccatcttcgtgcttaaccaatacctcttgtccatgtcctttcaacttcaaactggtgttggtatttcttaatgacattagtagaaatattcattcctagcaatgatgtagaaattgatgtgaccatggctactatagatacaaccgtagttcacatcaagatcaagccgtccaagttctgcaatccagttcggccacctgctacagtgtggacttcaaaaggccgccaaatatgcatgcgagctccattttgggtccatgagtacttgatggaaagctctcggagtcatctttccaatggatccagcttcatcgccaaattccatcccagtcggccgaaatcacaaaaagaaggtgctgcgtcacctataatgggcctatgggcttgtaacttcgtctgggaccccggcccaagtggggcccatgtggggtgcgccccaaccaggtggagaacgaccctagggtcccgttaggtcgtcctcccacctccttaaatagttaggtaccactttagagttttttgggttttgtttagatgaaagtttagccattgctacttccttgcagcgcgcgtgtcggctagaccgtccgtctgcttgtatttgaaaccccaacttatcgtgtgtattcattcctatttgcaatttagatcgcttttatcatgttcttgcttgtttcttcgatttgcttgcaggaataaggttgatctgcaccggcaagatcaacaacccacggagaggtgtatcgatcgcaaaggcgcaacacaatgtcttgtacggttgtagttggatcgtcaacgtttctactaaatcgtagttatctcaactcactgaaagatcgggccaacaacagccttgagtgccgagtggaactcagggttcatcagaaatagtccaggtatatttatggttacctaagtaatccgcaagcgcacagatataccattatagcatttcatccggaagtattccaatgtattatatttatttaatccaaggtaaaattatgaaagagagaaccatgctaatatatacacatatatattacttgctttcatcaaagtctaagcaggggttaatttaatataagggtagagtgacaagaagcgaagcttatagattccctcatatgaataattctaaactaagtgggagaagagatagaaagaactcatttcctatacttctaatatacactcaaactctagtctacatttgctagtatacaattatgtggccaatacccctcctggtgtttcgagagaccatcccaggttgccgagtttcttacgacaacctgtcatggtcatccaaccggggttgaatatggaggagtaccctcctcaggaatttgtcttaggaatatatattaacatggaggaatacctatactgagctatcaccgtcagcggcgcacctctactgtcccgcagcatatatgcctagatagtgatatttagtaatctaagcaccatacttacattaataaatactactctacacctctgtagatgatataaagcaaccgataaatcggacactaaacccacaccattgcacctctctagtaggctactcacacaattataccgacacaaatgtaaagtaagagcaatacctatactaactaaagtaccgagaatatataaagaagtgtatttcattaattctgaaagtattatagaagagggtagaaaagctattagagccataccgaaactcttctggaagctctgaggactccgagaactattctatactactccgcttagcactaaaactactaaaataaagtatgagaggaaccttgagcttgcttgagtgtgttgtgaagttaaatgagctcctccatttatagggtcggtatgacggtttctgagaaggcaaaatgaccttcctgccccacaaccgccatcagcgagcaatcctggatgtccacgtgtaaggccgggctgagccgtcgccactagtgttcggccgaacctgggccggcccagcaggcctccatgtttggctagggtaccgacaggtgggtcctgttatcggttgtgacagttaaggtggtttccggatggttacacctgacatgtgggccctccttatccatatgcttacttaggagtgagttttccttattttttcattattttatttgcttaattcttgcaacaaattattctccaagtacaagtggaactatattaatctaaaacaaatatgcattataagcatagctaattctcttttattatagttatattggttgtcggaactggtttatgacaaccgtcaacaactggctggggctccccataaacatgtttcatttatggcggagaggactgcttcacaacagccctgtggagcacgcccatctccccagacgatcctgaggtcgcgcccttgcgctttttgtgatgataattcatctattcttgggcaagattctcgaagatgtctttgatgagtagataatgtatttattttgtatgtttcgacgctcttctttgcagaagaatgcggaaactacaagggctaaggtgtccccggtcccaggacgaggccgggactgaggcagaccttagttttatatcttctaagatgtagaccttgtatgtctctacgctcctcctactggatagcataggacttacaaggactaaggcgtgcccgggacccaggacaaagccgggtccaaggcagaccttagattacattcttaagacatagcttttataggtctcaacacttctcttcactgagcagtattgtaacctagatgagctaaggtgagcctgggacccaggacaagaccgggtccgaggcataccttaggttacattcttatcccgcaaacagataaaggtgggcccccacctacatcaccctggggtagcattttattttttagaatggtttaagcatgccatttactttacttgtaattgttttgccggggaattgggtaccccgttcccatttcaccgacacgccgggattgtcagccttcttcttccttgtacctcagcagatgcttccttttataaagtaagtgttcaaaattcttttatgttgtttaattaatttacgtgagttagatatcttctcattggtgtgtattcatagctccaagggccaagttctgtgagctaccccttcttcaaaaccaattcatacatctagctatgaacttagtcctagatttatagcgatggttcagggacaatccttctctggatgcgaaagcgaaaatcactatgatcatctgcgtgaaatttgagcaactgtgttcatgcctgataattgcaggcattgcacaaggcacctcacgatggaagttgtttcccttttctcttacagaaggggtgaaacaatggtacacccatacggtgagaaaactatacggtgaatgggtggagttgaaagtaggttctgccttgctttcttcccattaacccatgtagcttctctccgtggtgtggttctcaatttttagcaaaataagaagcaatccgttggtgtttcctaggatcgattttccttgttaactcaagccaactcagacttgtctctacttgaccatgtgttagtacaacaatcctatttggatttagacaaggagttttccatgtatcctgatatttccgccggaggttcgttcgcacacaaaataatgatggaaggtagggaactcctggatcatatcttggagaatacctttttcgttcgttgcgaaacctttcaggaaatcgagcatacacaagacgagccttcaatcgttgaatcggagcttgtaaccttcatatcttaagattcaaccattgaatgctcaaccgaaccatgggaaatgaaggaagaagaaattcagccttcggatatcccattccagtttaagggtgatctttttgaagactatggaaacacctcaaactattctgtgcaaaagagaccaccagtcccacgtagttggaatgaacctctcgaggaaaatttccttaaagaggtagttcatcaactagctaccatcatgagtgaagagtagttaagggaggtggagctttcatctgaagcaattcggattagctccccgtccttaaccattccctgtctcatgagagaggccatggtgcaaactctttttaatgatcccactagcagtgcaaacattatattggcatcctttttaggaactgtttgcacccacaggcctaaagacaaagctttgcatcatacattatatcggttttgggacgaactgttagcacccacagacaaaaccttttaagaaccgttcggttctaccatcgaagggtatagggctatccgcagagcgccaatcaggcacaatgatgtcaaggtcatccttgatttccatgtgttcgaagtctatgacttcgccctcataataggccattctatagaaaaactcttcttagatgtgccgagaaccggagttctcgacatcaaactcgataaattgtcattttccttcccgatctcaaggtcgaaaaactccttgacggaacctgttcccgagtctgagccaattgaaaacatgttggttgtctctccatttgagtccctgaatccctccttgaagatgatgccattgcatttgttgaggaagaggacgattttgaagacatgatcgagttacccaaaaccgatccgtcttcatgacctccgattgagctcaagtctttgcctttaggcctacgctatgttttttctgcatggtaatacagagtcacccgtcatcataagtgacaagttgacccgtcatcataagtgacaagttgactgatgatgagacctcctgactcacagctgtgctagaaaagcatcattctgttctaggctactcactttaagatctcaaggggattagtgtggctctctgcacacatcgtatccgtttatatcgttcttgtgcgcactctcgagagccacaacgaaggctaaataatgcggtgagagaagtcatgaaaaaagaggtcatgaaactcctacacgtcgggataatctatcttgtgccgtatagcgagtgggttaacccagttcaggttgtgcctaagaaaggaggtgtggcagtagctgagaactaaaagtgtaggtgctagcatgactacacaatgacacctagaaagtcatcctttaaaaataaattgataagatcgatcactacacaaacatgaaaatgtgaatgttcaaattcgacctaaaaataaaaataaaataaaataaaattttaactgggaatagatgtccaatttgattatttctgtagtgataacataaattgatccatatttttaattattttataattttttaggttgcaggcacataacgagggaacattctctctcaaggccgctgtctttttctccaattgacgatctatatcagccattgcagcaacatttggtacattatcctcctgactagttgacacgtgagagctttcctggggatacggcacggatcaggccaggatttcccatctcgtgggttgccaaatggaagaatggaaaagaggaatgaaggaagagaaaaaaaatagagaaaaggatagggacctttttgaaatattttgtatttgaaacaatggaattctgagaattttcaggattaatggaataagctccactttagaacatcaaataagataaaataacttcaattaataattgggtgctatctaattaattagtcgaattaaacccttttaataccccccaaaattaaacctttttaatttataaaactttcacgaagcaaatttttgcgaataaaagagaacatataatttctaaattaggcaaatttaaaactagcacaaatggtagatggaactcgcaagggactgttacatgcgtaaggctgcgtttgggaagcgtggtgtttattaatgtatgattaattaagtactagcttaaaaaaacttgaaaatagattaatataattttttaaagcaaccttcgcataaaatatttttaaaataacacatagtttaaccgtttggaaaatgtgcacatgaaaaatgaaggtgagttgggaaagtcacctgaagaactcagcctagtgaagacataatgctttagaagcgtagatactataggtcggtatctattcaatcacatacgattatcatttaatttgatgattttatattgtttgctacatacactcctattaattgagtagtagaactgagaccaaagatgataatcgtatgtagcaaacaatataaaatcatccaacatctttggtctctttttggtgcaatcaactactactcaacagcatgttgaaaatagaattgtatattagaaccaagcatgaaaatataactatattattcctaaactagatataacctagaaaaacccctatcaatccacacttgcatcaccttgcacattaattctatacttgtgcattttataatagcagtgatggttggttactgcttttatggaacatcacttgtcacagtcgttggtcgagaagactcttcactgaggagatgccttgacaaatctggttggttactgttgcttttcttctcctcgtttttaccccacaacacaaggtagaggccaatcactataaggacagctccaatgatcctgataattgtaaatgagaaaaaatcttagctccaacaattggaatgttttagactaatcatggatgagcctgaatgctcatcattttttcttttcagatgtgcataatcattattcgttctgtatggaatgtttttcttgcaggttacatttgtttttccttaccctcctgtgtatagtagatcgccaagaatgacggcagccattatagccaccatgacagtttgtacaggttggaagatagcagtgaacagagcaccacccctgtcaatgcaccagatctgaagagataaagcaacccctgaagcaactagaccctgaagacaagatgaatggaaatggtcaaggaaattatgtttgccgctttcttggaatatatacatgtaatttacaaaattgttgctaccaatttatttttgtgcaacaaatcttgaagtaccactgcggtgtacttaattacgatgaaacacgtaaacgttatggaaatatggaatatggataaatgaaaattacagcgtagaggattgtgaagagctcttctccagaatgaagcctccacttcccaatgtcattctcccagaatgctgctatggccaagaattgtaccagcccgaatgccagggtcagcgcaagcattgacaacctggctgggtatttcttcaagactggggtctacacaaattaaaagagcatatttcaactagagacgatgtagcgtgcatcatgtatagtatacgtagatggaacaaactatcaggaaacttaattagtcataagcggctggctatatatgttgagttcaagtaagagtagacacctgaagtaccatccatccagaccaggcaatgcaattgccaaggaggaaaaggcaacccacactccaattcaaaactacattttgagacacagtgttggctcccaaaatataggatgacttgaagttcatcagtggtgtccctttgtagagagtaatgacagttgctccccctacgcttacaactgtgccaatcacttttgccatcccatacctcttgtttatgtttacttgctcaagcctattaattaaccatagaaagaataaaaggtagagacaccagattagcacagaaacgtacgaactaatgttaaccaattaagcttttagctttgttcagtcttcttttcatgaacacagatgtgcattcaaaatacaatatgttactgctattactgttattgttcttgttactaactaggagcacttttttttaaaaaaaagaaatattaccaagttttgattgatagcttcaatgagtagcaaaagttaatgaagtgcctaaatgataatgacattattgctggattacctcagagaagcagccaaggcaaaggttattgctggtactgtattttggatagcagaagcataggttggagacaggtagtgcaaaccaagaagatagaaaccctggttgcatgttatcctgataaagcaaagcatatggtcattatacataatctcaagcaatctatttatctttcagtgcaatgtgcatcgaacttacccgcagaatgccagaaagaagagctgggccagcaaagagaaggtgaggggtggtctatttttcctacagatgtaagataaaatgtatagtcagcttataacagacaggacaaaaacaaacatagcaagataaatagaatgtaaaggaaaaatgtattctcacaggcacacagaatagatgtttctttttcccttctaaatctcaatataagtacaatttagctgagaatttcgaatttcatgcataaatggcaacgaattgaatcgaagaggtatgtctgagctcacttttcaaggaagtatgcaaaaggtatgagcaatgccaaggcgatgcagttgcggtagacggtgaagacgatcttgctgatgcccatgttgagggctgccctggacacaatatggaaccccgcgaggcagcactgcagcgccagcacccccagcagcagcttcaacttctctggggcgctttccattaccatgacctccctctccctgacctccttttcctcttctccttagctttgactccaacctagctcacctctgtgtgtaatgaaattgttgtttgttgttgttcccctcgttccatcttatatagaagttacataccggttcgatctcctttacgctgtacatatattttaattagactaactatgattacaatgctcgtgtcaagtaaaaaaacaaagaaactgaaaatgacccaaacaaaaacgatgaagccaattcgtggtggagaaacatgcaccaacaacataaattaatcacagggatataatttggcttcctgagctacttgcatccactaatccaagttgatccaagcattatgcaaatgccatgttacaggggacaatacaggccatgatgccaatatacaatcagccagccacatatataatactaattaatatgatataggagcatatgttagtttcaccctcaacttggtaagacatgtagagcaccaacaaaccacatgaatgcagcaactagctagcaacaactaaccactaagagcactgggcttcttggcctgagtaaacatgatgatgagggatatgtcgtcaacccattcaagtgggagcaacagttgttgaggaggtaacatgagctaccaattaaatctgaccgtccatcagagaggggtaagattggtccaaaatattagtgcggctttcatcagctcatcgtttttgtttcggtctcctggaaagcgctgtaattcaggtgcgcggcagaagactcaaccacccctggagtccgtccatgacgcgcatagagacgtcgaaacgaggttgggttgccggtcgctggggtcgatgccctcgaactgctgcgggaactggataaagcagacgtggtcgccgtggtcgagcagagcatgaagcacatcccttcagagcgccgcaaagttgtgctggtcggagtccgtcgccatcgacggatcttagagtctcatccgccgctgcctggaatttgaggatgctgttctagattcggaaaaaacttaagggataatggctggatacgaagcggtggttcactggtttgttacctatgctacaaatactcatagttagtgtggtaaaaaaaattactatcgttgcatctacgtgggtgcgagtagtagtaaaatttaacatagaagcatgagttatcgtttcacttgatggcaatttgatgaaggtttgataggatttatttgatcagtaaaaatttaacttaggatgacaagttaatatttaacttgaaggcaaattgattatggttcgacatgatgtatttgacaagtaaaaatcatttatttaataaaaaaaggaataaaaaatggctcgtaattatcaattcattgcgtgctgagctaaaaaataactcaatatgctaaataaattggagtacaacacacaagggttatctcgataacggttaaaaaaacctgacttgttcaataatagacaataaaaaagtttgttccccaaacatttaattcttggatatttgaaacaagaagcatctaaaaaataaaagtaaaattgaaattagaaaaagttggttcctaaaaacaaaataacaaacatttaatttttgcgaaaatattgaaacagaataatataaaaaaaatttatggcatcaacaaatcgagtaaaacaataactctaaaataaatatcacactgtttatgataagttaactgtaaatgaaagtgattagttaaaaatttactacacgaaactgtctatatatggtgggctatctggtggatgtgtaaatagtaaaaatttgactactggaatcattagtggaacggggttgcgctgtgggtggaaggtgaggtcagtatcacacttcgtttaatacgtacttcctccgtccaaaaaaaaaaaaggtaaaccctgggtttccgtatccaattttaactgtccgtcttatataaaatttttttataattcgcattttcattgttgttagatgataaaacatgattaatattttatacgtgacttgtctttttaatttttttcataattttttcaaataagacggacggtcaaacgttcggcacggaaaccagggtttgtcttttttttggcacggagggagtagcaccttaggtgctgaatattagttatacgggatggctatatatttgttgacagattttttatagttgaatcattcactttttaggccgttgatctttctttgagattggtgcaatccaaaagataagaaatctgcatgatgaggctaaaaaatctgtcacatgatgtataggcagtctcatgtgaccgattttttagcctcatatcatgcagatttcttatcctttgaatcaacatctaacggatgacattaatatacacaaacaaaataaaaaaaacaaacaaacgggccacatggacaatatgatgctcacgtgggctcaaatgggctcaagtggatttcagacttacatcgtaaatacactaaaattatatatatatatatatatatatatatatatatatatatatatatgtaattatagtgtaagtatgatgtaatttgtacgtgtgggatcatccgatattctgtcagcgaacttcacgttaaataagggtaaaaagagtaacaaaagggtcttatggtgtgaacacgttaatgaccagacattggattccaattccatgcaggcacaggacatacaaaaccgaatcttagcatcaaatcgaatgaatagaaaagtgacagatttttgggaaaaaattatcgacaaagatatagcaattctgcacaaaaaaaatcccaaacactctccctgtcggtggctagtagtatcacaaaattgaacagtaaatgtgagaccacataaagcccaaagagccagtaacccacggacggaacaaactagatgatactaatctaggattgcaccaatctcaaagaaagatcaacggcctaaaaagcgaatgattcagctataaaaaaaaatctgtcaacagatatatagccatcccgatatatatatatatatatatatatatatatatatatatatatatatatatatatatatatatatatatatatatatatgctccccaccaggtccatagtatgcaattaaaatttaactcactgacgaccaatctcaatcccacccctgcgcccccttcccccactcccatagtccgagtaaatttttacttaatgttatccaacttcttattagttctatatgtagttaaaatttaactcaccgacaaccaatctcgatcccacccatgtgccccctcctccactcccatgtaatttttttacttgatgttatccaacttcttaggagttctatatatagttaaaagttaactcgccgacgaccaatctcgatcccaccatgtgccacctcccccactcctagtccgagtaaattttttattttatgttacccaacttttcagtgtgtgtgtctctctctatatatatagatataggacgcacggatggggctccatggagtatgggctccaacgttaggagccgtaggatgcttactgatcggttttgatcatttgggtacatagcttaatgggtatacacccgtttagagtatagtatttaataatgaatggaatccacatatttgaatagacagtaaaaaaaaggaataaatgcatttatatgcatgcaatgcggatgagagaatttccataattgcgtgtacatttcaaaaatggaaacattaaatacccgtgaaattggaaataatatcttgtaaatatggaaacttacttgcttcacgttggggtctgaataaatggtaacattattgtgaaaaatggaaactaagtatatggaaaaacaaattaattttttggaaaaatggaaagtaagtatatgtgaaaatggaaactaagtatgtaacactaaatactgattgttggtttttggaaacatggaaacaaattagttggaaatttattatatatatcgcagaaaatttattatattcaaatgtatttggaaacatggataatatcgcaacaaatttatatggtaatgtatccgtaccaaattattacattcatgactccattaatttagcaatttgagtgacaaaatatgcactatgggtcactttccatttttaggtacgaatgggtcgtatactcaaaaatttggtatgaaacggaaaaaaaatcccatgcaatgaaaaaatttcaattttagtctatgttaattttatggcaaaaaaaactgggtattagaagtacatttttttgtaattatatgatgtacgaatatgtgaaaaaaactttggtacagttgtgcatcacgccgcctagccgttcgatttaatatatgttggatacttgaaaaatctagtatatactatctaaaatatcagtatataccggagaaaaaataagtacaatataaccagtaaacagaattgatttaggtatatacccattaaaaattgcatatttcggatacccatttttagttaggtatatacctatctaaatgggcgtgaaaaaattttgactttcaagtagcttacattttttttcttgaactgaatttgaaactagccaggccttttagttaagttttttttatactctcgctaggtagctgaccagatgtaattaggtacatgtagatgtgatgtatgtatataagtctcgtgtgttgtgctttttaattttttgggtatgtgacgtgcatgcgtttcaaacgtactacaagctaggtatttacatgcatgcatttcatatgtacatttaattgggtataataccatttaggatacacatttttaggtatttaaacacgtatgttgggtatgtgtgacataccagattctatttgggtatataccggtctaaacacacatactaggtatatacccattaaaaattgcatattgtagtttggtatatacctatctaaatgcgcatgaaaaaagtttaattttcaagtaggtttttttttcttgaactgaatttgaagctagctaggccttttagttaagtttttttatactctaactaggtagcttggccagatgcaattagatacatgtagatgtaagtataagtctagttgggtatatacctataaactatttatagatttaggtatataagtctcgtgtgctatgtatattctaccgatgtagattaagtaggtggtgacatttatggaatagtaggatggtaggtatatacatagtaccaaaatattctgtattaatttgcatgattacaacgtgcaaatttcatgttaatacactgtcaagaacatcagtttaaaaaaacttgtgttgatacactagctcttagcgcgtgcatccaactggtgtttcttctgcccacgaccatcttctccacatgatcccagggcaacatacgtacgtacagtctttggctcaataggaagatgaaccaaaaacttattagcaggatacatttccatcttaaggtcttgacaacgaaatgaaattgttacagtactcagtctgcgaaaacggtagaacagggacttgtcaaaatataagaataaattgaaataaattacacacgaaccacacgcgcagtgaccgtcgatgacagtagcgacgaacctcctcacgggcgacctacggcggcgacaacgaaccttgcgaacgaccgacggtgcgtaacggcgcggtgacgaagctaacagatgactgacaacggcaacgaaaccttgcagacaaccggcagagacgaaaagctcgccgacatccggccggcagggtagtagcgtggactggacagtggagtgtgtaaaaaatgaaatgtcataccattttatatgtacacaaaaagtggaaaatattaatcagtattgatggaaataaatcaattacaacttaattagtggaattactgaaaatttgtggatctgattcagtgtcatctcaaatatggaaataaattatcacacaatcatagggaaacgatgtgagcatgtgccaaaaaaaggaaagtatgtatcatatatggaaataaataatcatgcaatcggaaggaaattattacgtacatgtttgcttatatggaaacgatgtgagtacgtttatatggaaaggcaatacatgcatgtatgcaaatcatgcgggtacactaaaaatggaaagatctaattgggtttaacccgttaatatatctaataccctggtttgagcagcacaaatctcaaagcacatatacggtggatattgttggagcccatactccatgtagcactagttaatttacctatatatatatatatatatatatatatatatatatatatatatatagcaaatctattctacacccctcccttagaataactattctacaccccctctcccatgggccaatcccacctcccccacccttcttagggcccaaatcccccctcccacctcagtcaaaggctggtcaaagccccctcccgccggtcaaacccgcccattgactcccttccccgcccaacactttgttgttcacgtctcgcaaaaattctgcagtaacttaacagtcatcgtgcggtaacatgacaactttctcgcagtaacaaaattgaaatgtagtcatgatggatctagttttgttaatcacttttttacgaataccatggtgcagacggattagaaaaatactatataacgtgagagatattgctttctaaagattgagatttacttttttttagttctcatctctttagaacggcgaagaaacgcgacgatcaatgtgcagtaacacgactactttccgcagtaacaacgttataaaagcatttttgtctcgatcatcgtatagtaacaggactattgtcttgctgtaatgtctttttaaagcattatggtgaaaccggttctaaaaaataatatgcaatgtgagagatattattgtttaaagattagaattctaaaagtttactagtactaagctttgctactatgtatttttgtatggacaaatagaagtacttttagcacttgcgttaacttgtgaccatacacatacacttttttagcacttgtattttgcacaagattttgatttaaaaatttagctatgcacaagcaatggtactgtagtgttgatgcaaaaaacacacagtggccaggaagatctgcttaacttcagtgcaggtccaaaaatcttgcctttaggttcgtgagtgtgccagttgatttgatcctgcaatcaacaataaataaagacaaaagaaaccacggttaaatccataaacgatagccgatcggccagcagccgatgacatatcatttatcttcaagccgatgtcatatttcaatcgatcggcagttataaataaacaaggtagaactaaatctattcgatcggctgtagatattaatggtatataatgcctctgtcgatatatacttaaatcaagtgattgggatagatcggtcaccatgccgagacagtataaatcacttagatcgaaatatacattaatagggagattataagcattcatagcatagccgatcagatagatctagcatgtatcggctaatactctgataccactctatattaagatattaaagcaagcaaaatacatcaaataggaagcttaatatacctaaatgcaacaagatcttaacataaagggcggatttaacatgtcaatcaagaatgtaagacataaaggagttaaatcaggtaagatcggctgaaaccccgatactaccctaattttcaaccaaaaagcaggctagagattgagattctaatcacgacttataaggtcaaacttaattgatgcacctataagtatggaaagaataacaatatctagacaatcaagccattggatgtttcatagggtggtggataccctatataatctaggtcaacgttggtatttaacctaatcggctgcttcctagtgacagatgttagccgactgaaggttaaataacaatgttttcagagattatatagaatatatgataactcgacaacttacataaacaagattagagtgtcataaatatggaagcactaatcccgagaacgcaagccgtcataacaagttttacctgtagttgaagatcgaaatcgatgcagctcaacccgaaaacaagaactcgtcaaaacaaaacgaaagtaaattaaaaagatggcgatgcgccgagattgtattgaacgtgttgttgttcgattacatgggtttgggttctatttataccagagatacaaaatatgtccttgtcggacacgtttcttatctctaacaaactctaagatatcataagtctttgcagtagacttttgcccaaacttatctctaaggaaattacataaaatatcctaattaatagatacaattgccttttcaggactcaatccatgcgtggcaatccatatgaagtacgataactcaacccgacaacgtgtaccgagtcacattgtcggaatcggctcaattggctaccttgtccgacacgaactctgtcgaccctggtcgcagccgattcttgctttgtttccggaacgatctatctctcggatttcgcttcggttttatcttcatctctgatacttgaattaccaaatttggtcgttaacatgtagtagtaccgttactaccatatgttctctgttactgcaaattcatcatgatgttactgtaaaaagtgcagtgatgacctacaaatttcacaataacgacctataacatttgcagtaacgtatcgtgttactgcacttctgcgataatgttactaccgaaccatagtaatgataatgttactaccgaaccatagtaacaaaggtatattttctacagtaacataacgggtttgtgttcacaaaatttgaacagatatattgagaaagcaaacaatgatctcaaacaacatagtgttatagggtgatttggttaggagagtttgttataaaccatgagattatgggttctagtcttgaattcaccaattaatttatatttttttctagaaaatagaagaaaaaatgagagatgggagagaaaaaaatgaagaaaagaaaaaaaaagaagagaaagatcggggatggggaggaggaggagaaaaagcgagaaaaaaaagggagagagatgcgccggggagaggggatggagagatcgggaagagcgcatatatatatatatatatatatatatatatatatatatatatatatatatatatatatttgcatgtataccacaccctaaggtgccacgtatcttcatagcacacctcacaggcaccccgtctaatccccctatctagctcatccccagttctctacctgttgcagctagtaatttttttactatcatcttcttaccacctcaccgcctatgaagagtaatttttttactattgtatcccaccattaaatcaccctgtttataccctttttactgcacaacaataactgaccatttcatatctctcatatatatatatatatatatatatatatatatgtatatatatatgtatatatgtatatatatatatatatgtatatatatatatatatatatatatatatatatatatatgtgtgcatatatatatatgtatgcatatgcgcctgtgtataagaaatcataaagcaataacaagctttttggagaaaaaaagaaaaaaatctttagtactaaagatcgattttaagtcccgattatttcaagcggactaaaaatacccatctttcgtcccggattgtgcgtcccagttgcacaatggggactaaaaagggttgcgaaccagtcttaaagatcaattccccaacagtgtctataaaatgccatcgtacaagcgattttatttaaaatgtcatcgttgttagggttccatctatctcatgccgttaaatacaccgttccctgtagcacttaacggagggttgctaacggagccttaatggcgacgatatttttgggacaaagtcgcttgtacgatggtatttcatgaaattcacacttatcaatgatatttcttgtaattgtgcgcttgtaaatgatattttttggattttctctaaatacaaaggagagcattcattggtttgtattggccaacggtcatgtaaagctgttgaataatgttaaaggcctaaacggggatttgaaaacaactgaatcttttgctagatgttgttccctgtgcgcatccccatccaggtcatctgagtggcagtatcaatcaatcacagagattttttttttcgctgggaatcaatcacagagattgagtggtgctttagtctaggttcacatgttgatggctaggaatcaaataccatgtggtcttagctcactctgttgggtattttgaccatttttctgatacacacagctgattgattcacatggttacggttagacgattcagtaccttttgccatgaaagataaattcctgtaacaaattaagaagcatgtgtacacgtacaagtgttacaggacgtacgatatatgaaggttgcatgtgggattgaggacaagtacaattatttgtgcatcaaaccttaattactacctcggtcccaaaatataagaacttaaatcgaatgagacatttattagtacaatgtatttaggttcgcaacattttatttttttaaccaaaatatgggaaacataagcacaagttgtatacaactgcttgacaattgcatcgtcgacttaaaaagagtttttgcagtacttgtactttagagataaaccggagccgttcatcaagatgtttacggcagtgttcattggtgagggttgggaacccagcatgccacgtccgcgacggcctccgatcgcagcccatggcgccactgcacactgtttgtatttcttacagtcacagataaaatccgcaagtgcacggatataccgatgtcgcacttcctctacggagtattccaaagggtattgaatccaagggacgtgtgtggtcagatcttcctccgattcatccaaggacaccaagcagaagataggccaggatagagaggatttactagtgagaaacagtgtctaagaaaagcttaactttaatcctaatgcaatacttcgggcactgccaacccgctgctcccagatgttggtctactacgtacccggacagggaggacttaagtgctcttggaggttgtcaccacctctacacctaccttaaacgaactgtggaatacgcagcagccactggagattaattacccagacaccgcgtctacgcaattaataactactctagtgtcgatcaaacatagcaatcactataaacaaatggactatagtgaacaataatcccgtatgctatttaggaactaacgaagagataaatctcacgagataattctaaattactcaggaagaatattatattgaattcagagtaataaacagaataaaagaaatgagagaagattaccgacaactccggaattcttctgacttcttctactctactctcttcctattctagtatacaatatagtacaatagagcctcttataattcagctcaagcttgaaagtgtgtgtgtcaagtgagggagtgatgtctttatataggggtacgtatgacggttgtactatgcgaattgtcggaaatgccctgcaaccgccatcaggagatgatcaggaccgtccacgccaaaccctacatccaacggtggagctggtgattcggccgaacccctggttcggccgagcatgggctaggcccacctggcctggcctttggcccatgtcttcctctggtcctcctctatccattctttgttattttgggctaattttctggtgttttgatgaaattcacaacccatccttgtatggatacataattctcctcactttagtctagatttcctcccaacctcgaggtctatcatctgcgtacaaatatacacaaacatttgtggaatttgtgagattaagcacctatcactatgttggatgttttattatttgaactttatgcagatgttggcaatatagaattggcatttaacagccgccaacaaaaccccccacacttagctctttgctcatccctgagtaaaggttagtgtagaatgaatttcttcaaggtatgaatgaggcatataaatcattcacaaccatacctgcacctgtgaactctattagtggctatcttaccatcttgagcaattgataaatggaacgatcccgattccagtccttcttgcttctctgtcagactcatgggatttttatgaattttcgcaaactagctcttttcctcatattgaccttctctcttatctctcaaggatgtgtattttctttttggatcctcacaaaggcaaaatttgctagaacttacccctattctaaggctgatatgtggagcttggtagggataaattgttacatacctgcattatatatattgcaaagccaaaaatatggactcaagaagatcatcagtcgtactcctagatcaagggtctttatttgtggtagaaaatggaaaagcagaatatttgtggaatggtggaataacgaaatgattctccctttttcctatacttcctctccattttgctttctcggcatgaatatggaaggggcatggctatattttcttttaatcttgctcaatgttttgagagcaagctttatttccttctctttcttttttttatagccatgcctttcctcccttctttcatgtttctttttatcaaggactcttttttttaaaggagaagtaagtacagtctaatgtaggagtttatttgaatggaatttttatgggaagccaacttccagtgtaggagcttagcttagtcatgtatatgtggaaatgaaagtggaaatgaccccttgatcatgagagtatgaaagatatctaacacgagtcacataaatttgacaaggctcaatataatgtcaagcagtcatatgcataataaggtttatcaaagatacacttgcatatggccttggtaggtataaaatgaagtcaattggaggaatgagcttttaaaacaattttacttcgaaaacaaattcccaagagtcataacaagagtcgcaagaatttctttcatcttgaatcatctcacataaaacaataaacaattacttagatgcataatgttccctaaacatggatggttgttcacaagcacaagttcagctgagaataatgaatatacaagatcaacaatatgaagaatttcattagttggaaattttatcttttacttacgcttgaaccaattgttttctgaattttcagctctagtactatatcgtggtggagatatacagataatagacgtgctcacctgcttacctgtaaaaattgagggggattggggccaacactggtttgaccgaacctggtggttcggccgaaccactctggtgcccaatccctctgcaattttctgcagagttcagtgccttccaggtgttcagagactcaacaattttcagagtatatgcatgtcagaagctgggatatctccccaacacttattcgaaacctgaactttattaaacgaaaacaaaaacaaactcgacatgcattggggttagcaccaatgagccatattatttatagcaagcgcttacatgattggaaaaatagaaactaagcaccttctactattttatttatgagagaggagacatctaatttgcataatacttattctccttccccatttctacaaatgcacgcttgattttagcacacaaaccgcgactaagggtatcaacattattcctaagttcagcaagttctacgcctagttccgcgttgcaaaccctaagctctatgttctccttgtggagtttcttcacttgcgcggcgtgcttatggaccgagggctccggtgatttcacttcgtcttcttggaattggccggccgcccttacaattggagggggcgtcaaatgacgcttcaccttcataggtggagggctatgggattccgctgccccctccttctaagatgtcatcaaaggctggagcaaacccttaccatacccaccgccgggagttcgcactccctgaatgcaaaaccggtcctccttcggagtggatggagtagcggtgggtgtgatatatttgtggagcacttcatcccatgccttggtgaatagggtgcccacatatcgctcggcggaaggcggagcggcattctcatcgtcttgaaaaaggcgtcgctccttcaaaagaccgagtttgcccattgtcggccgtcgcgcaggtgaatacccccagattttggtcttcgtaacatggtgaggggagagggatctctctgccgaacggggccgaggagggttcggccgaaccagcgagctcgccgacgggctccagattcgcagggggctacgcccacagtgcattcaccccttccattgtgtaattctccaccgggatcaattggttcgccggtgttggctctccatcaagattgtaagtggaattggaggaggagccaatgtatgggatcaaggacttgccaaccattggtgaattggaggtgatggaataagtgaattgagatgagatggagaggagttttgcaaaagtgggagagaggaggaagaaaaggtgctctgggtttgatatgactaatctacctccgaatgcgcatcacaacagactatagacgagcggggtagacggatgttcaaaattggggctgatcgggtgccaccctggttggttcggccgaaccctggtgggtccgactggctgccaactttttcctagacccactaaatcctaagctaagaacaaaaatgacaactttacagggtttttagcatgcaatagatgagaacattatggttcataatcgattaattcaataacgtccacttcttcatctaaagtttcatttggctcaaggaaaatctttaagcgttgaccgtttaccttgaatatattacctgagtcgtcgtggagtgtgattgccccgtgtgtagaggtgtcgatgacgttgaacggtcattcccatttactacgcaattttccgtggccaaaaagcataactctggagttgaacatcaatactttgtctcctggcttgaatttcttgatttttatccttttatcatgctagcgctttgtcctttctttgtatatcttcgcgttgtgataagccttctccctccattcttcaagttcatcaatttacatttttctccattctcctgctccttcaaagtccatattccagttcctgatggcctagtatgctctgtgctcgagttctacagggatttggcatgacttcccgtagactatttgataaggggacattccaatgggtgtcttgtatgctgtccggtatgcccacagtgcgtctgtcgaggagtaatcctttctagcgggaggtcgtgagaccccctttgtgagtttggccggggaataaggcgcgatgatcaagagcgttccacctcctgggatctggctaactagatcgttcacaaacaagtgtcggaaaccgaggattatacaggttcgggccgctaaggagcataataccctactcttgtgtgtgggattatgatcgagttcttacgtgggatcttgggctcttgggaaaacctaactgcattttcccctagagctcaagctatcaagagtcgtcctttttcttggtgggaaagatcctccttttatagtccaaggggataccacatgcaccgcctttacacatttcatcattggtggggggcccatacttcctgggtcaagccactgttcaagccttcaatcggaagcaaggtggccgttcccccctaggtgggtcccggcgccgccctccgcctgacatgggggacatccccgtcattccctcttaactccatagagacttttgtggattcatggacgggggcgcacgtttagctgcgtgtcgatgggatagggcatacctgcccccattccgcctgacatagggcggggcgtgggtgcactgccactcgtcccatccgcctgcgaccagtcacgggctggtcaaaaccgatgacgcacgtcaatcgggcagcgttgcacgcctgccctcgccgcattaagtgcggcgagggacggttggggcgctgctcatttatggcgcttggaggcgcctctggcttcgctcacttggcgccacgtggctaccgggtgagggcctcggggcggcgcgcgccaagggcctgaggggtgcgacggggcaccccgagggcccttggccacttcacgaccgctcgacctcccccgtgggggcggggggtggggggggagcaggccacacggccacgtggccagatggaaggattctttacctctaatgtgggtacccccgggcccatatcaccgacagcgtccggcaatctatccttccatcctgttcccattttgttgaccgtcttttgcagaatattcttgatctgtttgtttaatatttctgcttgaccgttggtctgaggatggtaaggagtggccacattgtgcttggctcccatgtctcgtaggaggtctcggaaggtcttgtcgaagaagtgagaacctctgtcacttatgaccatcctagggttaccaaatcttgggaaaacgatttctgtgaacatcttcttggcatgcttcacatccgtggcgctgcatggcatagcctcaacccacttggagacatagtcgactgccaccagaatgtactcgcagttgcaagacttagggaaaggtcccatgaagtctataccccaaacatcgaatatctcgacttgcaaattgtatgtgaggggcattgcatcacgagcagtgattcctccttgcctctggcagcttgtgcttcttctgacaaattcttttgaatcttcgtgcattgtcagccagaagaagccactttgccaaatcttgccctgggtgcggaatgcaccgtaatggccaccatagggtgaggtatggcattgctctatgatcttaagtccttcttcagtcggcacacatcttcttagtaagccattggagtggaccctgtataggtatagctcatcccatatatgacagcgactttcatacttcagctttcgttgattttcccctagtggtatatacttggataccatgtagtttactatgttggcataccacaggttggagtcgcgaaccgtcatcagcatgtcatctctcaagaagtcatttattggttgttcctgcgtgtcagtgatctgcaacgtagacaaatgatctgctacggaattttctactccctttttatcctgaatttctaagtcaaattcatggagcagcaaaatccatcttaagagacgtggtttagcatctttcttagtgagcaggcacttcagagcagcatgatcagtaaaaattattaccttagctcccaccaagtaagatctaaacttatcgatagcaaaaacaaccgcgagcagctctttttcagttgttgcataattcaactaagctccggttagagttttgctagcatagcagattgcatgatgctttttatccttggtttggcccaagaacacaccaacagcgaaatcgcttgcatcacacatgatctcgaagggcagagtccaatcaggaggttgaatgattggagcagagacgagtgcctttttgaggatttcaaaagactttagcaacacatcgtcgaactcaaagggcgcatccttggccagcaaattggtcagaggccgggcgattgtagaaaagtccttaatgaagcttctataaaagctggcgtgtcccaagaaactacgaatccccttgatgttcacaggaggtggaagctgatctataacatcgattttagcacaatcaacttcgtttcctcgttcagacactcgatggccaagaactatcccttcacggaccatgaaatggcacttttcctaattaagtaccaagtccttctctttgcatcattgtaagactttgtctaaattttgtagacaatgaccgaaggactttccatagacagagaagtcatccatgaagacttccatattgtcctcgatcatgtccaagaaaatagacatcatacacctttggaaagatgcaggagcgttgcacagtccgaaggacatcctacgatatgcataggtgttgtacagacatgtgaacgtagtattactctggtcctccggatggataggaatttgatgatacccggaatacccatcgaggaaacagaagaatgaatgatttgccagccgttccaacatttcgtcaatgaagggcagtgggaaatgatcctttttcatagccttgttaagcttcatgtagtcaatgcacattctccatccggttacggttcgttgcagaataagttcattttgagcatttgcaacgaccatcattcctcccttctttggcacaacttgaactgggctaacccattcactgtatggtacgggataaataatcctggcatgcaggagtttcaagacctctttctttacgatttctcgcatcgcattattgagccgtcgttgaggttccctagagagagtactctaagggtcaatatggatacgatgagtgcaaagtgcgggattgatccctctgagatcttgaaaggaatagccaagaacagaacgaggcttttccaacacagttagaagacgttgaatctcgtcttcggagagcttgtcactgattatgacaggggcttctctatcattgtgtaggaaagcatagcgtaggccctgaggtagaggttcaagctcaagcggaggtcaaggtggcggttccatgattggcagatcgggagtctcaccgggttccgcttcatccttgatgaagtcggggacttcatcttctagaagggcctcgggagactcatgagggggaactgctataacctcctctgctgactcaatttctgggagagggtcggtcaaggcgatccttgcccgtgagaatggaactgaaaattcattccctcccagtgttattttgagctatctaatcggggtgtgttaatgaggagttgctcaatgggaagcccgattaggatgtcaaaatcttggatctcaaagacgtggaaatccaatatcgcctccctgtcttcaaagtagacatgtacatcttacacaatcccaaatccttcaacgatacttccgtttggatgcttgaataatttgttcgtcggggtcactgccttatcgcttaaataagcgaacgcacaagactcagaaacgagattggccccaacggttggactgtagagaataccaacgtcattcccttccagatggcaaggaatgattcgaggagcggtatttatccgaattacttcggatgaaagctctgcctcccttagccattcgtcgctcattatggatgtcaactcccgaacagtttcccttaggaacccaagttccataggatcgggaggtgccaaaggaacgagtggtttcttcttgctgaaatagttcagggtgttgccatagtcttcgtcgaaatagtccctgaacagaattgcggcacgatccggagtctgaatttcttcattctcaacaaatggctactcaggaaccttctcgtcaatcgagctagcagaaaaggatggttcagagtgtggctcgattgttagaggttcctctatcttggacacggatgcctccggctggagttcatcatattgtatcatgaaggaagtattttctagaatgcaatccaaaaatattcttccttccgacggcgttttgtgcatgaatgatccttcggcagttatgtcgagatagaatgtagactccttatccagacccgtctggaaatgttgcaatagcacatactcgggtaaggacagggttggtccggactgcactaaattagtgaatctggaccaagctgcatcgattgatttgtttttgatctgctggaaactgaggatatttctactcgaagggcagtaatacgagtaattgggaagaaggcaagacaaaatctgtcttgcaccttttcctagctaccgtttacacatccaacggtagatgtgtaccattgctttgctctctcttgaagggagaacggaaacaatttccaccgcacagtttctggtcacatgccacgaatcttaaggcatgagcagacttgctcaaagtctcgcagatgatggtagtgattttctagatcgaagccagaagaaggactttccctaaccatgctgattagtttggggcgaatttcatagccagttgtatatatgggctccgacgaaggaggtggctcatagaattcgcccctaggaacagatggctcgaaaagttggtgctccatggtcgagaagaaattagcaggaatacttctctgggtagcaggggtaaaggtagaataaaaatcaaaaaagagatacgaggatgaactggattcggaaatgatcagcaaccgttccctggcaacggcgccaaaaatgcttgttggtatttcttacggtcacagataaaatctgcaagcatacggatataccgatgtagcacttcccctatgaagtattccaaaaggtatcaaatccaagggagcgtgtgtggtcagatcttcctccggtttatccaaggacatcgagcagaagataggccaggatagagaggatttactaatgagaaacagtgtctaaggaaagcttaactttaatctaatgcaatacttcgggcactggcaacccgcagctcccagatgtcactctactgcgtatccggacagggaggacttaagtgctcttgagggctgtcaccacctctacacctatctcaaacgaattgtgggatacgcaacaactacttgagattaattacctagacaccgtctacgcaattaataactattctagtgttgatcaaacactaaagcaatcactataaacagatggactatagtgaacaatgatcccgcatgctatttaggaactaaccaagagataattctcatgagataaatctaaattactcaggaagaatattatattgaattaagagtaataaacagaataaaagaaatgagagaagattacagacaactccggaattcttccatcttcttctactctactctcttcctattatagtatacaatatagtacaatagagcctcttataattcagctcaagcttgaaagtgtgtgtgtgaagtgagggagtgatgtctttatataggggtaggtatgacggttgtactatgcgaattgtcggaaatgccctgcaaccgccatcaggagatgattaggactgtccacggcaaaccccacatccaacggtggagctggtggttcagccgaactagggggttcgggcgtagctgggctgggcccacctagcctggcctttcacccatgtcttcccctagttctcctctatccattcttcgaaattttgggctaattctctagtgttttgatgaagttcacaacccatccttgtatggatacataattctcctcactttagtctagatttagggtagcctcctgactccatgccgggatgactagggtcttcgcggggtggagttgacttgacgaactcgatgcgcaagaccccgaggtcttcgctcaccccctaggtgaaggcggagcccccagcatgcggcgtagcccccgggcgtagtagtcgcaccaagggcggagtcgtgccggccgggtgcaggtggagcccccagcatacggcgtagccctccggcgcagtagtcctgcttggggcggagtcgtgccgaccgggtgaaggcggagcccccagcgtgtggtgcagctcccgggcgtagtagtcgtgcccatggccgagtcgtgtcggctggctgaaggcagagcccccggcgtgaggtgtagcctccgggcatagcagtaatgcccagggcggagtcgtgccggccaggtgaaggcggagcccctagcatgcggcgtagcccccgggcgtagcagtcatggccaaggccgagacgtgtcggctgggtgaaggcggagccctcggcgtgcggcgtagccccgggcgtagcaataacacctagggcggactcgtgccggccaggtgaaggcggagccctcagtgtgcggcgtagcccccgggcatagccgtcgtgcctagggctgagtcgtgtcggccgggtgaaggcggagcccccggcgtgcagcgtaccccctgggcgtagcaataacacccagggcggagtcgtgccggccaggtgaaggcggagcccctagcgtgcggtgtagaccctgaactcgtggctaggtcggcgaggcgtgccagccgagtgaaggacgaagatccccggcgggcggcgtagcgcccaggcggcgatgggggtaaagccctcgtgcccgtggcaatactccagcgtgcggcgaagcccctgggcatagtagtcttgcctagggcggagtcgtgccggccgtgtgcgattggagcccacagcatgcggtgtagccccctggcgtagtagtcacgcccggagcggagtcgtttcggccgggtgtaggcggagcccctaacatgcggcgtagcccctgggcgcagtagtcctgtggcaaggtcggcgaagcgtgcctgatgggtgaagagggaggtgaagcccctaagcccgtggcgaggttggtgaagcgtgctagtcgggtgaaggtgaagagccccggcgggcggtgtagtgcctgggcggtgaggcaggtgaagcccctgagcccgtagcgaggtcggcgaagcgtgccagccgggtggaggcgtaagattcccggcgggcggagtagcgcccaggcggcgagggagttgaagcccccgagcccgtggcgaagtcggcgaagcgtgctagccaggtgaaggacgaagctctcagcgtgcggcgtagcgcccaggcagtgagggtggtgaagcccccgagcccatggcgaagtcggcgaagcgtgccagccgggtgtaggacgaagcccccggcgtgcggcatggcacccaggcggtacgggtggtgaagccccctaagcccatggagaagttggtgaagtgcaccagccgggtgaatgacgaggatctccggcgggcggtgtagtagatgatggagcctcctgtctatgttggggaagccgaatcgttgatgtagccgatcatgtagttgccgtggtcagagtaaacacggtggtagatgtagctgtagaagatgcgaccagcgccatcgtcgtcggtgcggctaacgatgttgtagaggagtgtcggcgtagacgggctgatgcaacggaggtgttttcttccttgttggaccttctgcgggatgatttatgaatgacctggtggtttcatgtgtgctttgataatggtcgtcgatataatgtactctgactttttcgccagcttctaagaagttgccagccacctgcgaagcagacgaaagggaatgcttctggcttggccggtttgggggcgtccaggaatggtggatggccgggagtttattagcttccgggcgtggcgagtgtactctgactttttcgccggcttctaagcggttgccagccacctacgaagcggacgaaagagagtccttctagctttgccgagttgggcgagtccaggaatggttgatgactgagaagttgtcgtcttccaggcgtgacgagcgaactttgacgttttcgccggcttctaagtggtcgacggccgcttgtaggacggacaaaagagagttcctctgggatggccggctgggtattaacttccggttgtgacgagtgtactctgactttttcgctggctcctaggtggttgccagccacctacggggcggacgaaagaaagtccctctggcttggccgggttgggcgtttccaggaacttttgatcatcgtgagattatcacttccaggcacggctgtactgtgagcctctcggaacttccgggtggttgctggccgcttgcgtagctggcggaaggagagggcgctggatcaggcaggtagacctgactcggggcttggttgattagcgtggaggttgaaggcaagacctttggcatgttgcgcggtttcttgtgtcttgattgtcgtggctgggtgagggcagagttgctttcatggtcttgtagtatggtggtgatgtgacctcctctcattgaccatgttgcatgcttgttgcttggtgatgatgtgtccccgtctgatcgcttggccatggtgcatgcttgctacttgaattcgtctgctaatgatcttgtcgacgggcggtgacgatgtggagctggaggccgttggacttggtagtgcggacggtggccttgacggtgctgctgcttggaattgacacgaagaggaagacggtgctgtactgcggtgacgacgaggaggctgaggccgtcggacttgcggcgggcgtggctgtggcgacgactcagccggccgtcttccttgtagtggcgcagagactacggccttagtctggtagtggtcgtcaatcttcaaggtgtggacgacgatgcaggagtggaagacgatggcgccgcgcttgtcggcggcggcggcggtgaggtcagggacatcgctgttgttgacggtggctgcgtgcaccggcggaggagacagatgcgggcgatgatgttgtttcttctctgattggctggccatgttgccatgtattgcatgctcctatttggttcgatttgctcttcttggtgttggacgcatggttctgtagcatgcatggtgatgacgtgtcttcatgcaacatgaatggtgatgatgtgtctccatgatccaagatcaatctcctgcatgtacagatgcaggatccacccatgcatgtgtgttgtcggtgaaagacttcacgctatcgatgacgagcatgcgtcagcactccagggtgttttggccgcagtgacgaccagtgcacgtgcagcaacggatcggccggtagtcatgctggtgaccatcgagcaccctggccccgctcgtggaggcaaccacgacaatgcccatgcataatcatatatcaatctacattagccactaggaaaaacgacaaacccgacggtgttgaggccatctcctccttgaagaaacgatcaagcgccccctacctggcgcaccaattgtcgatttctactatcggcaatatattttttggggtgtgctagatcaatgagagatggtgacgcaggtgtttatcctagttcatgaccacgggaagaggtaataccctacgtccagtgtgttgttctctgtatcggggtggaaaaatgaactaagcagcccccctaggattgccgccagcgctctttatatagagctagggctgccggcgccatacatggcagggtatctcttatagtctaggtacctgccatctatttacaagcgataggatagacttccttatcttttatctcttactatgtatacaagtgtgccgcatgggcatagggcacttggcccaccccatgtggtgcagcccaaggcttgtcgttgggtacccgggtaccatgtaccccacaatcatcttcgaataaaatcaacagagggcactatttacctcctggaatagagccgaaaccaaggtgaatgcctaaggatttaacggctactcaaaagagaaggttgcaacatcttcaggcccaagaattaagagagagagaggccgaagaggaaagagatagaaagttcaacaagttgcgaccaccgcgtacaaaggtatggaggcataaatccatatatggagaaaaaccggttgttgtgcaaaaggaaaaggaagaacaatcggttgctaaagaaaattcatctccaaaggaagacatggatatcaacatggtgtgtatgttgcctatggagttttgtgctatggatgaagccgaggttgctcaattttcactagatcctaaagactgagaagcccgatgagtcaaaccatcatatgaagcctctttatctcaaaggtcatattgatgggtagccagtctctaggatgctagtggatggaggtgctgccgtgaatttgatgccatactcgttgttcaagaagttgggacgtggagatgatgagttgaagaagaccaacatgattctcaatggcttcaatggtgaaccaacggaagcaaagggtatcttttcggtggaacttaccgtgggaaacaagacgttgcccactgccttcttcatcgtcgatgtgcaaggtaactacaatgttattttgggtcgttgttggatccatgccaattgttgtgtgccttctaccttgcatcaatgcttaattcaaagggacggcggtgatattgaaattgttcaagcagatacattggtcgaggttgcaatatggccgatgcaacatttgagtggtgtcatgggaatattcaatgcttatcggggaggaatctttctagttatgatttcattagtatctccgatgacaaatttgtacctatctctataaagccggctaagcacggctaggccatattactttatgtaatgagtgaagaagctaatttagagtggtttcaaaaaagggtgcaagaatatcggtctacaaagaacgatattggtgaaactattgaagattttgatgaagtagagaagcttggtcaagggtttacatcggccaatccgttggaagaagtagaaataggttaaaatctacccaaggccgacttttgtaaacaaaaatatgagagccgattataaggttaaaataatcaagcaacttaaggactatgtggattgcttcgcatgggagtatcatgagatgccgggtcttagccgtgatcttggtgagcatcggcttccgattaagtagggttttaggccttataaacaaccacctcgtcgtttcaatcctttgctatatgaccgagtcaaagaggagattgatcggttgattgaaagcggggtttattaggccatatcattatgtggagtgggtatctagtatagtcccggtggaaaagaattggagcggtaagattagagtttgcatagactttagagatttaaataaagctactccgaaagatgaatatccaatgcctatagccgacatgatgattaatgatgcttcgggtcataaggtgattagttttttggatggtaatgccggctacaatcaaatttttatggtggaagaggatatgtactattggtatttcttacgaccacagataaatccgcaagctcacggaatactgctgtagcacttcaccttcgggtgaccccaaaaggatatcgaactcagggaacatgtgtaatctacccaaggctaagactatccaaggacaacaactgatgctaggtaggctaggctagagaggactttctatgtattttaattatctacgctaagcaatgtaattccatatctgttgcttcgggcaccgacccctgctggtctgccagcgtggttccggctatagctctatgatgtatccgaacgtggaggattactgggacggaattcagggctgccaccacctatcgcctacctttgagaaatccgtgggatacacaacaaacaaaggtaatctctaacctagacatcacgtctaagttattaattactactctaatacttatacaagaacttccttctttatccagagtccgagtactaaagcacttagtatgaatactaaacaatgaacctgcaaagatggaaatataacttactcagagtaagtaattaaataacataagaaaggaaaacgaatgcttactttatagaagaagtttctccgaacccggagcagagtgtaccgacagctccggtactcctctagaattcctcctaggaagctacactcgtcgagaaagaagtcagagagagcgccaaactttctgggcactcctccagagcttcccctcactctttaccttactctaatgtacaaaagatacaatagagcctcttgtaattcagtttaaagttgtgtatgttggaatgtgagtgagctcctccttttataggcaggtatgacggttacagcctatgtgaaatgtccaaaatgccacggaaccgccattggcaggtgatcaggagtgtacacgtgtaatcttgcgatgaacggccgcagaactggttcggccgaaccggggttcggccgaacccaaaatgtgtcctcccagcctctccttcagccgggaggttgcttaatgggccccgaataacctaggctatgttttggcccaattctaaatagtttttattgacttattggtcctctaatccgtgtaaacgcgtcctgaatgcggaggtacattttgtcacatgacggatgtgttttctcctcaaattacctgcatacacatatttcaccaacagtagtggaaaggattagtaataaaccctacactaagttggataccatattttatttcattatatgcaggtattgacggtcaaatattatgatttaaggaccgtcaacatgtacaagacggcttttaggtgcccgggatttgttggtctatttgagtgggttgtcatgacttttggattgaagaacgccggtgcaacatatcaaagggcaatgaatttgatcttccatgatttgctaggtattatcttagaaatctatattgatgatattgttgtcaaatcggatggtatggatggacatatagccgatttgagattagcttttgagaggatgcgccggtatagtttgaagattaatccacttaaatgtgtttttggtgtatcggtggggaagttcttaggattcatggtgcatgagagaggagttgagattgatcctaagaagatagaaaagattcgtgatttcaaagcgctgacatgcaagaaggaagttcaaaaattgctaggtaaggtgaattatttgagaagatttatttctaacctagcgggtaatatcgatgcttttgtccttatacttcgtttgaaaaaagaagtcgattttacttggggggcaaaacaataagaggcatttgaggagttgaagaagtatttatctactccacccgtggtacgagcacctaaagccggaatgccatttcggttatatattgcctccgaagactaagtcatagatgccgttttgacacaagaggaagatggcaaggaatatatcattacatatttgagccgccatcttttggatactgaaacgaggtatgtctttatagagactttgtttatgtctatactaggcttgtaccaaattgcggcattatttgttatctagtacatgcatagttgcttgttaagccgatgttattaaacacatgttgtaaaggccaattctaagagggagaattggcaaatgggtgctttgattgaatatgatttggcttatgaaccattgaaatctatgaaaggccaaattgtagttgattttatagtagaccatcatgtggatattgcttatgaagaagaggtttgcttactgaagtcataccttggaagatttattttgatggttcttcttgcaaagagggtcaaggcataggagtagttttattttcacctaatggcatgtgttatgaggcatcagttcgtttggaatattattgtacaaatgatcaaaccgaatacaatgctttattatttggcttacaagtgatggtaatggttggagctaaacacgtggaagcatttggtgattcggaattggtggcgcaacaagttgccggagcttataaatgcttggacggatcaataaataggtatctcgatcaatgcttggatattattgccaattttgataatttttcaattagacatattgctaggcgtgataattctagagcaaatgacttagcacaacaagcatctggctataatgtgaaaagaggagtatttttgatattggaagagccggtgcttgattttaaacctttgtgcgaaattggcaaaatcagagaccaggtgcggtctgactggcattacatggccggtctgacttgtgaccaggggcggtctgactggccatatgccgccggtctgaccggccaccccgggcagtctgactggccttgcatagtcggtctgaccgtttctggacaggaagttgggggcatgccacaattgattcaaagaccgaattaattgtaaattcagacgtttgtacccaggaaatacaagaagattggagggttcctttgattaaatatttgaaagatcttacacttaaggttgatcgaaaaatttggttgcaagcgttcaaatatacattgcttgatggagatctatatcgcagaaatatagatggagttctattgaagtgcttggatgatgatcaatctaaagtggctataggagaggtacatgaagaaatttgtggaactcatcaatcggcccataagatgaattggttaattgggagagcggggttctattggccgaggatgattgaggattgcttcaaatattataggggatgcgaagcttgtcaacggttcggcaatgttcaattggcgcccgccgccgtgttgaaccctattatcaaaccatggccgttccgaggttgagctttggattttattggtcaaatttatccttcgtcatcaaaggggcataggttcgtgctagttgcaacagattacttcagcatgtgggccgaagccgtgccgctcaagaacatgactcatacggaggtaattggctttattttgaagcatattatccatagattcggtattccacaaacattgactatggatcaaggagcttctttcatgtctaaggaactgaagagttttgccgaatcctatggtatcaaattgttgagttcttctccttactacgctcaggctaatggacaagccgagtcgagtaataaaacgttgttgaagctggtaagaaagcagattgaggaacacccaaagaagtggcatgaggttgtttctgaagcattgtgggcacataggatatctaaacatggtaccactaaagtcactccttttgagtcagtttatggtcaagaagccattttgccagttgaggcgaatcttggctctcttcgttatatcaaacaagatgatttatcaagtgaagattacaagacattgatgggagacaaccttgatgaagtcatcgacaagcgcttgaaggcgaagggtgagagcaaagttgtttcaagttggagacttggtttggaagacaattttgcctttgggtactcgatccagagagttcggaaagtggtctcctagttgggaaggtccttatcgagtatgcggcattgttcgagggaacgcatattttttggagacacttcaaggagagcgttttcagcgggcaatcaacgggaaatacttgaagaaatacttcctaagtgttttgcaagacgcttaggagtttctatggccggaaattggattatcgtcctatgaccaaaacatgttctatgcttttagattcatgttgttcatcaaaaaggcagggaggcatgtgtttacacccaaatttggcacctaggatcgaaataggaaaagttgccaaactttgaggttgtgccggttttctccagagagggccggtctgaccgccatatgttggctggtcagaccgccgctagaagaccggtcagaccggcggtgtgtggccggtttgaccgacagagtccgagtccaggactgtttcgccgggtctcgaagtttccttactcgggaaggcatgtttcgggtttcctttggattctatcccgagttagatgtggataagggcctgtagagggcaagaccaacccctatataagggataaggctggttcattgtaacaaccaatctataatcaatcaatcgaatcgtttttcatattgcttttagttttctcttagtttgtccatctttgtcaatttgcgccgtaaattttccaccgccgctgcgagagtgcgagacctctttgtaggtttgtcctgaaaaccttccgttttgcccacgagacgggtagttatctagaatcggctccgctagccagtttagttatcgaaacccttcttgatttagcttttgctagattgaggtggttggcgactctactatcaccgcaaagctttaggtgctgcgatcgtggttgtcaacttgtcacaaaaagttgccaacaatcagtccttgaatgaccgttggaggattgttgtgtgtatccgaaggagtgatgtccacatcaatggtggcttcatttactgaatggcatcgatcttttcagggttcgcttcgaccccctttcggacaccagaaaatccaataacttacccgcgcaaacaccaaacacacacttctctgggttcaatttcatgccagccgcatggatgttgtcgaatgtctcctgcaggtctgacgcatggtcgaaagccttgcgactttttacaacaatgtcgtcaatgtaggcttcgatgtttcgccccaattgtggtactaagaccttgtataccggcctggcgaatgtagccccaacattcctcaggccgaagggcatcctgagatggcaaaatttgttgaaaggcgtgataaaggctgtcttggggatgtccgctaggttcatgtgaatttggtgatatccggagtatgcatccaggaaactcatgagctcacatccggcagtcgaatcgaccagttggtcgatccgaggcaagggaagtcatcatttcggcacaccttattaaggtccgtgaaatcgacacacattcgccacttgccgttcgacttcttcaccagtaccgaatttgccaaccagtctgggtagttgatttcttagattaccttgctttgagcaacttttgcacttccgcttttgccgcctcttggcaatccgctgacatctttctcaatttctgctgcttcggctttgcgtcaggcttgactgacaggtagtgcatgatgaggtcaggcgaaacgcctcccacttccaagcgaagatatcaatgttcttttttagcatagccaagatggtgttcacctcttgctcgcccagatctccccacggggatacgactttggtggggtcaatatcgtctatctgcacctgggtaaccttgccatgtggagcgggcttcggcactagtctggctctttcttgcccttcgacgtcgacagtgtgcacttccttgtcgaatggggccactgaagcagccgaaggctagagccccttgacaacaatcacaatggccggaccaggaaataatacaattggccaaaatagataatgaggtcatctccatatcattttgcatttctcgacaaatataatatgtttggctattctaagtggttctttttttctgggtaaagtggaacttgttattttgaattcttgggttcaggaattcttctataacttaaatgactcagtaaaagcttttttattcttttagttactgatttttttgttgggttttactccacccgcggttgggaactactaattcgttgggtctataacaatcttggatgggttcctaacgagctaattttcactatttttgtttgtagttttcctgtgattctagatacatgtttgaaattttgggtctttttttatttaaaccgcctatctccttcgcttgtagtcggcatcttgagcttgaggtagttgtggtgggagactgcttcgaatttgttcaaagtgcctcggccgaagatggcattgtagttgtatgggatgtcaacaacgtcgaaaagtatctcttcttctcgcttgtattcttgagtgccaaaggagaccttcaggagagcctgacccaaaacttgcacggccttgccttcgaaacctcggagcaaagtcagtgcttgagacaatgccagggttggtagtcccatcttggcatatgttccggtgaaaatgacatcagccgagcttcctccatcgatcagaatatgtcgaacttcaaaaccgactatttctaccgataccaccagtgggtcttggtgtgggaacaaaactcattcggcatcctcttgtctgaaatatatctgctgcgccaaatgcctcaaggccccttcgcttgccgaaacgatgttgtgcactgctcgaagttgcattttttttcttgcgtttcgacgattgcgaagggggatcaaatcttgtgatgacttggatcactcttcgctgcgcatcctggcgctgttcggcttacgtggttggtcaagagccgcttcctgaggcgcctcttcggccttgacttgctactgccttggagcttgagtgttatcttgctgtcgaatgtttcgacattgctcggttgtgtgcgaagagtgtccgtgaaaggcgcagtacaaatccttcttgattttcttgcgaaagggttgttgatggctacctgcttgttgagcgtcgaactccttgcggagggcttgcacttctttgacagccattactgcctttccagcgcgatcagttctgaactttttccacgtcattgaagcttgattcggcctttgaggctgcccttgattcgccggaggtggggggcaaaccagcacgggtgctggaccaacggcttgagcttgagcttgtgcgacggcggcagttgtagcggcagctgccttgtcgtattcggcttggatttcttgccgccgcttggtgtcttcctcacctcaagcataaccatcgattatgcgaaagaggtgttcgatcgtcctttgctccttgcgagcaatcttccttatgagttcgccctcaagtaagccggccgaagctgcgttgacgacggatgcttcggttatatcttgcacttggcatcgcgcctgtgagaactggcgcatgtattcccttgtcgattcccctggcctttggcgaataccaagaaggtcctgttgggtcttcggctcctcataggtacctcgaaagttaaggacaaagacatcacgcaattgctcccatgagtaaatgctattaataggcaagttaaagtactaggaccgggcaatgccgtcaagcgcgaggtgaattaccttcgccttggtattctcatcaccgtcagcagcttcaattgcggattcgtagatggaaagaaactctttcgggtccgtttctcccgaataccttgggacaggagggtacttgaactgtgggagggaatagggtgactcttgattccccagcttagcggcaaacccttttcgccacccggctttatcgtgacgccttgctgggagggccaacttagctgcgggtatggaagacatggcttgcacatgggattgggctacatgtgttgactggttccctgtgctgaacatcaacgcttagccttgttggtctgcataaacggcttgtgccgtcacggttgggtcgatcatggcttgggttcaggcttggttcgtgtcacgctgttggtatttcttagcaacactactggaaatataattcccagcaatgccactagaaataatcttggtatattatgattacagatgtgatccgcaagcgcacggatatatcattgtagcatttcagccaggagtattccaaggtatcgtatttattttatcccaagggaagatatgataagagagtactatgctaatagtttatatattacttatatacgtcaaagtctacgtaggggttagttcagttcaaaggataggttgacacacagaagaaagaactaagaactactctcattaaaatatagtctaagctaagtggagaaagaataagaaaagtatcattcctgtacttctagtatacatacatctttagtctatacttgctattatacagtcatgcaaccgataccccgtacccagtgtcctcctggtgtttcgagaagccacccctaactgccgggttccttacgacagcccgtcatgaccatacaaccggggctaaatatggaggaatacactccctagggaattaacttaggattatataccggcgcggaggaatacccgtactgagctgtcaccatcagcggcccacctctcaaccgcaatatataactccaattaatggaatctaataatctaagcaccgcgcttacattactaaatactactctacatccttgcaaccgacatagagcaaccgaataatcggacactaaacccacaccaatacacctatctggaaagctagtaacatgactatattggttcaagtataaagtaaagtcggcactcaagtaatatgaatggaataaaataccgaacttgtataaagaagaatattctattaattcattaagtcttacaaaagaagaaaggaaagctattagagccatacccagaatctcctgaagactcaaggactatgaagactattctatttcctactccactaatactggaactactaaagaatacttgagagagctcttgatcttcttcttgaggtgtgtgtggaatgaaggaagtgaggggtatttataggtggaaatgacttgagaggatggagatcctccatagcatccaaggagcatcttccttctcctcatgccatatgttctcctgaagtcggtaatagcgtgggaaccggtcataacgaccttagggagtcggtatgtaactgcctgtgaaagatggggccgattgggttcagtagtgggtcgaccgaaccaaggggtcggctgacccctcgctggctcctctggctcccatttttctctggtggactaatatatgggcccttatgacgatggcatacattctagacccatttgtgattgttgaattggtcttttgggccttctgatgcaattgcagatcaccggcagactttcaactgattgatcgatgtatttccacctccttctcttcatttatgagtgcttctcctgcatacatgttagtagcatagcatatagtggaagtaattattttattttggaattatgcattgcaagcatagctagtcttcatatattggataatattgacggtcgaaactagtcgataacaaccatcaacacatgcccagaaatttagcccaaatttccagactatttggtgtattaaatccctgtccaggaccagccagggtacacaaaacgacaagtaatatacagctccaaacgtaaataaagcgtaaaatacttacagaagaggcaattagtttctcgcactgaaagagaacgacagcagcggagaaggcgatcctagcggggcttcagctccactccacaggtaaaactcaactggggtctgagccttggtcttctaacttcgtcttcagctcagaagcactacacttctgaaaaggggaacaatagcaaggctgagtacaaccatcgtaccactatcaagcctaaggccgccgtcattttgccaccttcggtcgcctcttgtcgtcgtcccagccacctttgagccatgccgctgccatcaccggcttcgccacctcaaggaccagctcggccatccctccgcgtccgccggtcatcgtcggtgcttcgcccgcgcagttttcccgcggggcgctgccgcctctcatcgccgtcggcagcccttccgcgtcacctcctcgccgcttcggcgctcggtgagaaccgccccttccttctctcctttccgccacctttcgcgcgccgctgtgcactgtgtctcggccgggctggctctaagccgtccccatgctctggccgtgctaccctgtggccgcccgatcggcttggccgattcaggccgtcggttcgcatggaccggcgatggaccgcctcggtggtcctcgtccacggtggaccgacctccttgtgccgccgacgtgtagggcctgcttgtcaacgccggctccccttttatgatgtcagcgatgaccttatcctctgaaaaagtaattaataattgcgcaataattcgataataattctagaaattcatttaaatggctcaaaacttctaaaattcatatctaattcatacgaaccccaaattgggccattcaacttgcaaaattcatctaaaattgagctctacatgtttgtttactttttatgtattatttccttggtttttattagattttttcctcgttttgtgtgccagcgtgtagaatccgtcgtttcagaagtctgcggtcgcgagaaaaagtgttcggaagatcaaagtgaagaagcaaggcaagtcacacattccccttgagcatattgagccaatttataaatgttttaccatttgcaaatgaagatgcatgttttgctaattacatgggatccgggtattacctatctactggcttgtgccatattatttgatatccgtcctttgtcaaccttgggtgataattcgactagcttgtgttacttatgttgacctagctagatcatatatgcttagccatgcttaattaccactagctcacaaaatgggataattacatcattagacatttagtatcttgacaagctgcatgctcgagacatctggccatgtttcatggtcgtaattatccaactaaggactgtgggtgtatcgttttgctggtcgcaccgatggcaattaaggaccgattcacgggaaaccctggaagacttacagtgcttaccacaagcgggagtggataactgcttgatctgaagtatagctcgaccctttcctaggcaccggtggcgagggtgggcgtgatggagttgggtcggccagggtgtccggttgtccagctaacggattcaccgtggcacacgaggggactgcccacctccagggtagggggtgggggtgaaaccttagcgtggtgtggatggtcaggggagggttatatgaagggtcttgtcacaatcactcaacatgatgatgtgtctgcgtaggcgcagtgacatgccggtggattgtgtcttgtgggtacagttgtgcacctctgcccagagtaaaactattcgaatagccatggccgcggttatgggcgatcgaccagatccaccgtgattagtcccatccttaataattggttaatgaactggtgtagttcaggtggtttggttgggcctgttcaacgtgttgtggcgttgttcagtggagatataatattactttaattactcaactgttttaccgttttgctcaatatgtgttttacaaccgcctttatgaaaatagccacaaacctccctttgtctccccttgcacgaatacatcgttggtgtggcttgcttagtatggttgttgtactcagccttgctattgttcccccttttcagaagtgtagtgcttctgagctgaagacgaagttagaagaccaaggctcagaccccagttgagtttttcctgtggagtggagctaaagccccgctaggatcgccttctccgctgctgtcgttctctttcggtgtgaggactaagtgcctcttctataagtaatttacactttatttacgtttgaaactgtatattacatgtcgtttgtgtaccctggctggtcctggacagggatttaatacacaaaacagtctggaaatttaggctaaatttctgtgcatgacagttcggctgtggacctgttcctaacccggggggcgcagcttgcatgaagatcatgggtgcttgaaccgtggcgccggggtcgaactacggcagtgggcttcgaggcgaagccccttgagctggcgggttcgcctgacttggtacgccgaactggctcaacagttgcctggcttgagcacccttactaggacttccctcggcttgtgccgaaggcgatttcttggtaagttgttgtggggttgattgagctgctgcagaaaggcttgaaactgggcttgcaaggccgaagctgcctccatcattgcttgcggcgtgtgagtgggcttcgagaactatgcttgaggtgcaaccgggtgaaccgacgccgaggtcatgtgaggggttgggcgcacggccgcagtcggagcagccttggcgaagtacgtcggagcttgtacgacttgtgcagcatgcggagggaaagcttggggctgagtgaagactgtcgaaaattgctgggtgtaggtcttggcttgtcttgccgcttcatacgcttgctgtagctcatgcatttggcgaagcgtgtcttgcaacttggccatgttctgacacatagcccccatgtcagcttcggcttgggcttcaaggttgacgttggcttgcgaggtggtgagtgcagtcgaaggtgtaacttgttgcgacgaggtggtggcttgagacgcccctggtatttgagatgaaaggactacgtccctgatctggagtgtctttgcggtagtcgccgcttcctagtctgtcgaagcagttggtgccgaaggtgggaggggtggcactgctgccagaagcggcgtggctcctgctttggcctcgaaagccgaaggatctgctccctctttgccggctatctcaccctcgctgctaccctcctttcgcttagcaaccctccccttcacgatcttctttagtggcatcagtggtttcactcggaggtccctatggtcggcgccagctgttgtcgaaacgacaactgcgtcacgtcgaaagacgtggttctctaactgtggttggaaataaagacaattgtattgcttagtagaaatttttcagatcccccctgttacatggccctatggggctacttatagccctattacagactcctcctttaggtttaggctttacaggggaatttacatggttacctagggacattatcatgggcccctaatgggccaaatagcttggcccaatccttagcgaaacctccgaaaaggcacaacggcccgctaggccttctcccagtgaggttcggtacttggcgaaacccgtgcccttcgcaggaaggctttcgcctcgcagtcttcgcctgtatgaccctctgacaaggtccattctcggcgaatcccgtgtacttcatgccacggctttcgccatgtggctttcacccatgttgtctcctcgtggatgcctcctcggccttcaccgcttgcctccggcttgagtcctcgcctaggtccttggtttcggtaggcccggccgaaggtcctcgtggtatacctccaacaacaatagttgggtgatgactacttgtcatgaccggaattaacccaacgggcattcctttcgtgcgtgtattattccttgcctcctgggacaaggaataataaacgcacgtaaggaacgcccgttgggttatttccggtcgtgacagttatttatcaaagaaataggtctataatcatgtgcaaattggggggaaggcttctttggcacaagagttatgaaagagtaattcagagcattcagattagctatactagcatgaaaatctgcaaacagtctatagaaatcctaggaaataattggccaacattttttgaagaaacatccattaaaaccatccggcccaggagccttatctgctggtaaatgggctataatgctatcaatctcttgagaggagaaaggcagcactaagtcatccaaatcatcccttttatcaaatagttcagacaaattgaaaaacatagagggggactctgaaacacccaacctggatctgtatgcttcaagaacaatggcagctttaccttcatgatcagtgacttcaactccattagtagaagtaatctgtgtgattgtgtttttcctaaacctctcagtggccatagcatggaaaaatttggtgttttccccaccaaattgagcccagttttgcctgcatcttttcttccagtaggcatgcttgtactgaagaagattaacaacttgtttcttaacaatatttctaaaaatgagctccggcactgaaagcaaacgacattcttctacaatgtccaagaagtgaatgactttatgacaattatcaattagcaaagagagctttgaaagctgtttactccaacattttagatttcttctgaccacttgctggagaaaaccatcatgctgcacccagaaattttcaaatctgaagacattcgctcttgggatggaagtctgcacttgaatctttagtggcacatgatcagagatatgcttaggcagagccaaagccagcgtgttggggtatgtaattgaccaatttggagtagtaaaaacccaatcaagctgctccagtaagggattatcttgcatgttactccgagtgaaagatctccccttcaaaggaacttcaatcaatcccagattactaatgagatcattaaacaggaagatatcattcatatcaccacccggcctgtttctgttttgaattgatctataaaagttgaaatcacccaaaaagatccagtttaaagcagaatcaatgtgaaggtcattcatccaagtaacaaactcatctctttgaggcctagaggatggacaataaacattgaccaggtgaaaagagtcagtattgagactggaagaaaaatgcatgataatagaatgatctgtttgagccactacatggccattgaaatgagcactattccagcccacaaacaatccccccgaggccccctggaaggggcaaaagcaaacttgtcaaagcgtctagggcaaaactttttgacataagccatatcaaagacctctctcttagtttcctgaagacaaaaaagagaacaagcgctttcctccactttctgtctaatagcattccactttgcgtcagagttgatacctctaacattccaacacagaaaattccagtttctatgcaatccattcatttaaaacaacgaataaaagatagagaagtggtaaataactagtatataccacaaacacaatcaaacaggtgcaaccccatatccaagggacaaatctgggccagtgtattattacaatccataagattctggtcgcagccagataaaggacatgaaaagttttccctatcatggcaactgggtagaagtagcagcagatccactccctagcccagccggagtggtcagaacttgagcagaaacttcattttccttcagcccacaaagattagtgcccatagtctgcaacatctgaatagagcattcaataggagggctctcagagtcactattgtcatcagtctcaaagaactcaggaggtaaagggtggaggaaggagattataccactttgttctgccagaagcttaagccttttagcacttttccccctgggtttaccaaccccctgcttgggatcaggagacatgtaaccccctgtgagcttattgattctggagcttctcctacgatcagtgtccacaattgccacagttttagctttagtctttctggatttcttcaaagatggcaggcaggaagaggcactttgatggaatggatcctgaggtaaaacttgttgttcagggagcacacaggaaatgggctcaaccatttcagcatcttcaaacatatgcgcctcattcatatactcatgtcccaaatctccctcagcctgttcaacctcagtttcattcccagccaccagcagaacagctgctaagagggcaaactgaataatatgggtaataggcaaagagtaggaaataatttgaagctcttgggatggacccactgcccttgaccactgaggagaaagaggcaacagactgaaagcacttgtaacttgaggttttggcacgtaatcttcccagcttgacagagcagcattcagagcgtttaacatcttccaaaaaaacggattaaccagaaagcgaggctgcatgagttgctcaagagtaattgagccctgagactgcagcataacatttagatttccagccaccaaagagacagcactaagaggctgagaattttgctgaatagctggagcatcctcttccatattatccccaaaagcatccacttgtggtgccggcagctgcaccggatcagggatgggaatatgattcactggaggtaaatcctcatccccaggcataacatcaggtagttctccatggcatagaaagactgagaccgtccaagatcttccaacacctccgaaagcagtggcccttttaataacaattcttctagggacctccagagtggaagagtacaaagcttttaccattaatcttccccttacattatcatctaactgaactttgatcactttcccaaacagagagacagctttgtcaataatagcaggagttttgaaatccaatgggaaatccaaaaacattgtccatccctctgaagtgaaaggggagttgcgacaactggaagtaaggtcatgaggaacaaagcgaagcataaactgattatccacttcataaggacccccagctattagagtatctctaagcagagcagaagctacacgaacatacatgaactcaatagggtgacggctagcttctaacacatgatagcccagcacattctgaacatagttaatcaccagatgtctgaaaccttcatattgctcaggagttggtggaggttcaatgcaagcgacagccataccttcattgcgcttagggggatcttcctggaggcaaagatcagcacgctcaagctgatgatcccagggctcaaggagctgcagcgtcagagggagaaaaaatgcaggatcagggttcaccaccgccattggagcactcggcgaagaggtcaagagcaaaagaggggcagactgcaacttttgagaggaagaggaagggcttccttgatttttgaagcaaattatttctttccctaaaactgccctttccacaatagacttcttagccgcaggcatagaatcctttttgggcctccaaacttgggccttctttttattccagtaggctaaagcccggtgatccaatttgtgacaggaagcacatctgaccctattaacacattcaaattcccgatggccatgcatcaagcaacgatcacaaaaaggagggatcatagggcgtttcacaattgccatatcctgattagccgccttgaaaggcggatcactacccccctgatcacgggccggagctttgccggcggcaatctccggaaatcgaagacgatcaaagactgatttaacaggaacaacattcaaggactcagcattggaaatcggaccctttgaagaaccagctgtagggcgcttgaaattgctagacttattaacagctgaaacctttggaggattaatcaacttagtagcagaaactttagaaagattaagcaacttggaagaagaaaatttaggatgattaatcggcttagcagcaataacagtcttaatataactttttcgagaatggttatgaacagaatcaaacttcttagatttcctggagactagggtccattccgaattctgttcagcgcaccagagcatccattctttctgccaattagggccaccatctctccaaagatggaaccgggcatgaaaatctttgcaaataaaagaacaaagattatagatccaaatacccacggccttagagcaaaccaaaaatgagtaactccggtccttttgtggacaatcaaatagatcacccggagaacccccgatacaagctcttagggcaatcccaacagatgaagagcacaatcgaaaagaagcccgaggaaaatcgaccacaagctaaaaaggccgacgggagaagaaacgagagaaatgcacaggagaagagaacctagagaagacttcatcgtgaatccgatcaccaggggagaagtcccatccccctggaggagacggcgtaaccatggtcaaaatcagaggactccatggatcgcctcaggaatcgcccgcacaaaccggagctccatcaggaaattcactacacttatttgcctttcttctacttttattgtaggctattacctatcgatgatattgagattgacagctttgaggccgagggtgtattttgcataaattgatcgtcttttattttttgttgatgttctccttcgcggtttattttcatcctatattttggtaagcacttttacttgctactccatgattttttgtgtcaatagttatctataaatgaaaaaataccattatttagagtaattgccgccatctatatagtaaagtagggcaccaccctcaatatggttccagctccgccactgtcgatatgcaactaccaccatatgcacatcatttgccgccctaatctaaaatcatcattgtcagttttcttttttcacaaataacagaggcaacccctcttaacaatatttccaaatatcccgagtttaaagagtaaataccatgtagttgtaaccatcgtaaattttctaagcatggctaagcaagtagctttagtattagctcgaatatacccacattggtgcttagacaacaccacaacccatcctaggtgtatcaacagcaaggataatcaataagtcaaggtagacaatgcaacaagacggagtcgttctaccataacccaagtttaaaacatctcatgcaatttataaataacaaagcatttgcaacatataggattcaacatgatcgaaggaggaattgaatagggcttgccttgatttgttgtcacataatacttctctggtcctgctcacatcacgaacgaatccacaaatacaccatctattcaattttaaacgtaatccaaatgaacaccaaataaacaccaaaaaaaatatgcgcaaacatgcatgatactggttcagtagatagaacatgattttagatgaatttaggtgaaataattttaattttcgataaagcatgtgagagataataacggtcaaaattttatatgcggtcaacgacgtaactaatacttctctctttaaactggaattgcacacactagttttgcaaaatttgaccttgtatcattaaggacaatattattatagacctagcaaaatttggttcactcgaaaatgaattaagatgaattagttatgcatttttgaagtttgcctatttttttcatttttccaaatttcccttttgaatttacttttgcatctcgaaccctgagtttttatttatattacaaagaggtcatgtcttcttctccaaacgagcagggacagagcagagccatggctgagctcgatctcgagctcgcctgcgtcaaacggcggaccgaatgggaacggggttaaaagagaaaatgcagataaggtctttttgattccgcttctctattcatcccagccggtggtggccggaaatggtagggaactcgtcggcagctaggctactcacggactgcacatgtatgtggcaatgcgttcgcgattcgagcaaatagagacatgcaagagcaccctgatgctcacaggaagcttaccaagaggtcggccaagggtggacgagctccggagaggttgggcagcgagggtggcggtggagtagaccggcgactcagcgatggctggatctatagcatgcatgtcggaatcattacatgcaacatgtacaacaccatcccaggttgctactacgcgagaaatcgaccaatggctcaccggttggatgggaatcgacgacggaggcactaggtcggagtcagacaagacggtggtcgatctccctcctcgatgcaccattcttagggattcttggggcgtttcggagaggatgatgaggcgaagctagtggtgcagcagctcatccggatttgcctagaggcggcgggaacggcgacgcgatccagcggccgtgctctgagcctgcgtgaaaaacggcaacaccgagatgacgcagcgatgttcggtcggttccttgttgtgtatgatggggaaaacggagtcagtaaggcgcagggagaagggtgacgtgcttggtttggagggaaacccaccaagacaacgatggcaacgccatgtgctcgccagtgttggaaataaacacgtcatggtgtattcctggcgtggttgagtcagtgtgtgtcgtgctgctgcatgtgtgcgtcgtgtgcgttctgttagtttggttgagtcgtgatcacgagtgcatggctgctgcatggttgtttgcatggccgttgcagtgttgatcgagtcgtgggtgtgcatggtgtgcgtggcgtcggttcttgcggaggaagccgcgtcgtccgggcgagcgtgtggctcacggcgacgtcgagcgggttctgcggaacgtggcgcaatggccggcatggaggctagctcccggtgtgtcaccggtctataagaggccctgtactccttcgttgtttctttgcaaggttcagtgagtaataaagccaatatacaggagcgatcggctccgcggcgttcgtcgctgtaaaatccattgttcatcgtctccctcaccggcgtttgtgttcgtgagtgagagagtgttcctgggctgagccaacagccagtgccgagaatgaccctcgcattctggacgatccagaggtgttccctccctaggcttgactggaacgcaatgaggcgagctaggggaagacattggcgcggtggtagacttatgggaggaggtttggttgatgcctacgtttcgagttcacgagatggattatgtcttgcgtcctcaagccatgcggcgatggaacgggatggctgggtggtgccgttgtgtcagcaaggttcagtggctttccagagaaggtttgatggcaatagatcgtgtcggggtggatggatttggtcagaacgtcttcgccgacgggaggcgcagccgtacccatgttcttgtgatgctgtgtggcacgaggggttgggctggcggctgtggactggtccagggtggaaagggtacgaggttgagtcgagaacgcatggtggaaccaggtcttggacaaattgaagtccggggcactcgttctcttctttgtaagacatagcacgccacttgttcgacgaattgcccaagagggcagagtgtggagaagaggaaaggggatgggttggtcgtctcctggggctttactatgaatgacaagtggggtcagtgcttccagggcccacgaacagaggaagggtgggtagataggccagtgaacacaagatttagtcaaattccaggatttttccctctcccactctttgaaaatcgatttgaccaagatacttaagggtaaacattatggtgatttttgtggaggtaggctgtggtacatagattccatttttcaagatgccactccaaatttcgaaatggtttgctcccagaaattcaaacaaaagggctcttgctgaaggtttattgaatttttaaagggaataaactgactgaataaattctggaaaatttatattacatcatgataaataaactagtattttaataaattatataatgtatatgcttctgtttaatttgtttaccatcttagggatgtatcggtttagccgatgatgaatttgaattaatttaaatttgatgggtttatttgggctatcaatttaactgagagctatctatgatgcttagtatttgtgttgagcttactggaacttttagacacacagattagtcaggacaattccatagttcgttgtaaagcatatgagtgcaattatggatgcatataaaatccaaaaacaagccaaagtaaacatgcgacacataggggcacactctattccttagcagtcagcacaagagattacacctcgaaatgcttggatttcacggcactaagatctaggcaggccgtgctagctcgcgcttaattagttcgctcaatttgccttaacgcgcggcctacacttcaacatactagctttacatggttcaaaaatttgcaagccatttcataggatttatttattgtacccaggttcaataacttaaattttatttgttgtcccttatttcttgtgtgggtaggatttaattagtcacgccaactctttaggttttgttgatgatatttaaaagtgtcatggtattctctctagattaaacactccttatatttgaccttaattatcattcagacatttaatataaaaaaacatcttcttttatattttattctcaagcatacgtgctcgtatgctctattgtctctatgtgaccgtgtctgatttattacttcctcacatcttgattttcttttctttgccaaaaatgcacaagaaggaacaactctagaagttttttttttaacgatttcaaaataattgattttcatatttttaatttcttggtatgtcacatgaattgttagcatagtactctcttatcatatcttctcttgggataaaataaatacaataccttggaatactccccagtgaaatgctacaatggtatatccgtgcgcttgcggatcacatctgtaaccataatataccaggattatttctagtgctattgctgggaattatatttccagtagtgtcgctaagaaataccaacacacactatgggaatttacattaatacttagacattgattatttctaaggttaatgattatataccaccatggtattaattaaactaaaacaagataaatggtgcactgtgggtgcatagttttgttagacgcacccatggcaattaagaaactctgaaagaattaccgtgcttaccacaagccatcatgggcaacggttaggcttgtagtgtagcttttcctagccgacgtacccgagcaagggtgggcatgatggagtaggacgagtcctgcgatgacctctgatgcttctggattcacctaggcacgagagggggctgcccaacttggctaaaaggagggggcaaaacctgaggtgtggtgtgattggttaggaagggttatgcgatgggtcctgtcacagtttctttccgatatgtcgtggtggcatgtcggcgcatggcaacgtgttgtgagattgtgtcttgtgggtacatttgtatacctctgattagagtaaaactattcgaatagccgtgcccgcagttatgagcgatcaaccagattcaccgtgattagcctcatattaaaaatatggcccaatgaaactggtttagttcaggtggtttggttggagctgttgcaacgtggtgtagcgttagacggtgatgtttaatattgtttaatttaatttaactgttttactggtttcaactcatgattttaaatactagctttgatcaaataacctttagcttcctttggaattatcccgcttgatacattctcttggtatgacttgttgagtatagtgggtagaacttagtcttactttcttttccccccaaccctcagaggcatagcattattcggatggagactattcagaggagtaggcttgttgctgttgatgaaccctgagttccactcgaaactcaaggctgttgttggcccgatctttcggtaagttgagataactatgatttgggagaaacgctgacgatccaactacaaccgtacaagacgttgcattgcgtcttagcgatcgatacaactatctgtgggttgtagatcctgccggtgcaaatcaaccctattcctgcaagcaaatcgaagaaacaagcaagaacaagataaaagcaatctaatattgcaaataggaattgaataaatgataagttggggttccgaagaacaagcagacgggtggtctagccgacacgcgcgctgcaagcaagtagcaatggctaaactttaatctaacaaaacccaagaaatcctgaaggagtatctagctacttataggggtaggagaacgaccaagagggtcctagggtcatgctccaccagattgggatgcaccccccatgggccccacatgggccgggtaccaaacgaagttacaagcccatcggcccaatataggtgacgcaacaccttgtttctgtgaatgcggccaaacgagatggaattcaaagatgaggctggatccgttggaaaaaggactccaagatctttcaatgaagtacacactgaccaaaagtggaggtcgtatgcagattcggctgtcgtttaaagtcagcggtgtagtaggttgccgaatcggattccagcacttgaaggacttgatcttgatatcttcttgtccattcatgatgtgagcaatagttgtatccgtagtagccatggtcacatcatctgtcgtcaaggatgcccgtggaatggaatcgctatgctacaagagctttgttatctagttaactcattttatattttccgctgcatatgtaagactattatttttgtaagacataaatctgtgtctcaactttgtcggttgtgtaccctagcttgtcctgaacaagggatttaggccttgtttgattcagcttaggattattataatctggattattatgagtaagctgaaacaaacagatagcttattgtgatagcttagtgcttttttagattattgggtagctaacaggtaataaaaaaactaataatccagagaaacaaacagcaaacaacttattctatgtcggcttattataatccagctgtaatctagctcaataatctaaattacaataatcttaagctgaaactgatgaggacatcctccactattacccgctggcaaagacgcaaaagtcgggcggcaactgtgtgagcctctgaataatcccaccttacttagcttaggaggaggaagacaccttaaaagggagagccacccttcccctatcggactagtcttttagggtgattgggcctttctccgagtgggtgtgcctatgaactgttggggtccgggcaaccttaatttgttgggcctcggccaaccccacctgggccgtattgttatcatttggtatcagagttgggcccttgttaggggggtgagaatgatgaggacatcctccactatatacccgctggcaaagacacaaaagtcgggcggcgaccgtgtgagcctctgaataatcccatcttgcttagattgggaggaggaagccagcttaaaagggatagccacccttcccctatcggactagtcttttagggtgattgggcctttccccgaatgggtgtgcctatgaactgttggggtccgggcaaccttaatttgttgggccttggccaaccccacctggaccggattgttatcagaaacaaacagagccttaattacacattctgtttggaattctggttcggatatgattcaataaggggtaaacccttgtcggcttgtctgtggtttaggtagctaagtttccgcgaatttctaggtatttggccagtcggctacgtgtctttaattggttataatctaaagctttattatttgtatgctcttttatttatatatgccaatgtttgagatgaaagtgcgactgtccttatcttaggaactagtctaacacgagtatgaattctgagctttcctagtctaacatgagcatgaattctgagcaattaaaatgttgtagaggtgtagcaaattgatgtgtttcaaaaaccctaaaccctagctgacagtttcaaaagcttatacagttcaccgtaatcacagaaccgaatgctaccactgcacatgccgtgtaacaagaaaaaatagggtacgagcaggtgagcattgacgaatcacgtttgactctttattaagctttctttatttgaagcgccatgtacatactttgccatgcaaacagttatcttgagagttaaagcaagctatagacacatccgcaaactacaaatgtgcgaccgataatatgcgaagaaatctgcagcaaactgtaagtgtaaaacaatatggcaaggcgttgccggccgtctcaagtgcaaacagatggctacacttgaccgttccatccaggtaacaaaatacataatataaatctcttcgacagacatcaaagccacacgctaagaacatagagactgaaaggcacgctaacaaataaaattctaaaacccacgtagacctaagtagggcaggcctacatggtcaaccgccacataaccttacctcacagtgactatatcatcaatcttcagtatcattctaacacactcgcaagctagtgtgatggcgcttgtgctcaccagcaaaggttgcacaacgttctcctccaggatgtttgtaatctgacccttcctcacattgatgcctgcattcttctcacccttggcatgacgattccgaagctcagtcacaatagaaataggattgagccctgcattctctgctaatgtgtaaggaatgacctcaagtgcctcagcaaactccttgatgcagtaactctccatcccttggagctcctttgcccaagcagcaagctgcattgacatctctatttctggtgcaccaccaccagcaatcaaaaacctcttgttcaccaagcacctgaagcgtgaatacggaaatgtgaattgagatgaagacattgaaaaaatcaactcttacaagcccaagttactttcaatcacactggtacaaaatggcacaagtacttaagcacatgataatagccattttagagttaagagtgtaattatgcccatatggcacataaatggtgttgctagaacttaaagctgatgatatgcttagcccataaggcaccaaaaacaagataaaaccactgagtttagccaaataaaccctaaaagaacctctcacctagataagggctggttgtacagtcctgcacataactctgctaatagcagatctaaccaatctagcactttgatgactatcatgaaaccagcaaaattgtgtagttcttattgtccattgtatgccataaatgtcaactagccatcaggtaatctgagaaacatcaatagtatgcacaaatgacattacaccactcaggcacaaaaaccatcgacatctagtaggaggctttgtattttcatcaattgtttgggacctactccactcgccaagttgagaccaaaaaagattaccttaaccagttcacacgttgtaattcattaatgagtccagacaccaatctaaaatgcaggcaagaacaaataccaagtaacccattgcaacccacatcggtagagctactaagtagctctccaagcaaaactagaagatatataatagaatacccagaccaatctccaatcattttttaagtaatacaaaaatagaaatgggaaccatactattttacgtacaacaggtttattgttagtagataataaaacaagttaacaacagttatcaacaaaactgatacataagatttaggcacacacccctgttatcatcattcagatttttttctctagcagttatctgcagtaccaaaaaaggaaatcatataaccttattccagcatattcatgtaagacaaataatcatttcaagcatttattaatagctaaatgtcaaactgaactattacatgttcccctgagctaagttcgttcaaaaatatggagaatgtggatgtaacttaagagtgcaaactgttgtgatgattgacaaagaactacagctatctgttgtctatggagtacacattagtagcttattgtgttctgttaatattagtaaaatcattaagttatccaccaaattagaattaatatataaaaaggaagaatagttgtgagtctgttggaaaattgtcaattctactaggtggtgtataaacattacacaaatgcttgtaagatcaataaaatactaaacagtcctcatgagtggtagggagattgggggctttcctcgatgcattggttctcactgacacaggttgaaatcattttctagagagtaatgacactatattatgttctttcaattttgttagaggtcagaaaatctactaggttgctccattgcaattgcaaacaaatggaatgtagtcccaaagaaatataaatattcataaagtatcacaataattaaagaacacaatagagtctaagcaagggatattataaaacaaatgcatatatttactaataaattatcattagattaagataggttcatagaatggataattgatgatatcataagagagtcaagtcaggtcaccagataatattttaaaaggtgctcacatgcaaaacagatagcaagatggaattactgaaaaatataatttgtagcagcagttacaaaattatggcagtcatggagatgctaattctgaaagaaaatattacataggatgttcactggcatcaataaaaacaaacatacgcctgaagatagtctttacaaaaaatactaacttaaaaaacatatataagtttattcctcaaaatatagagggtatatggttaaatgtcataatttgctacaatagtatttgatttcctgcaaaactacacactttcccaacagccatgccccatatgatgaaaaatatttacaaattattgccacagctgtggcaaatgattctttctgccacacttttggcacagcattgttgttaaaatgccacaagagaagggatgagcagttataaagtgcattgtagaagatgagcaatcataaagtgaatggtaaacattcagcactgactggacaacctaagatcctggccttgagattcatcaaacacaattaaaacactcttacaactactagtgagtagtcctctagcacacttgacaggctttgaacaatcctttctccaaacatgcctaatgcagcatatatgggagataaggaaaatcacctatttttatagccaattgttgcaactgtgtacaagtaacatggcaagagtaaatcatctccagcgatgtggtttatccaaacccattgccttgtttctataactggcagcaaacttactgagcatattaaaataccattaccatgtgataaatgtttattgcagtgacaatttgacataaattgactgtaaagtctacgagggacaaaagtctataccacaaaccacagacatggaaaatagttgccaattgacccattaaaatttaagtttgtaacagtgaatacaacaacagatgtctaaaatttattgtttcaacgctatgtaagttgcattcaatctatattcattggcaagcctgtgttctctatctaactcataacaaatgtatacaattaatcaggccagtgctataaaataatgaaagtagatgcataatgtattactttctgaaataataactaatactagagaaaaaagttgttgcttcaaaatgtgcatatatagatggtaaaaacaaatgatactcctgcatggggaatgttatgaaacaaagtaataaaagatttggagcatgatcttagtggaccagaaccaaaaaaaaaaacatatttgctttgattccaatgcaattataaatactggtcatgccctaccctatatatgtgcattatctgccattaagacattgcccgctcaccgtattcaaaaagacctctggagaagttgactacaaccaagaaaattgtacgcatacaacatttcaatcattattcgagcgaagtattacctgatgacacaaagggcatcatgaagactgcgctcagcttcatcaattactaactggttggacccccggacaagcacagtagctgtccttcccatatccttaatgcccatgatcttgacaatcttgctctccccaacagaaacttcctcaacaagatctgcataaccaagcttgtcctcacggaaatgttcgatgttagcaattggcaggcagttcagggtcttggtgatgaactcaatctcatccctctccacatccttcacaaccaggatcttagcctttgcaagataatgaagtgacaaatcagtaactgcatcacgcaagatgcttttctgaatgagcagaacattgcatccagaagccttgatcttcttcaccatcccaagaatgtaattgcgctcctcacggaggatgcgatccatctgcgcgtaatctgatacgatgacactctgctcgatgtctgtcttgggaggtgaaacttggaactgtatgacagcaatcttagcattctcgacccgagttggtcctccagcagcatggctagccttcttatcgaagatgaggccgcgaatgagctcagtgtcgtcaacggtgccaccaagcttcttaacgacgcggatatctcggaggtcgaggaggtccgggtgagcgggatcaacaacggagagggcggcatcgacagcgaggggggagagaaggctggagtactgggaaacgaccttagagttgagtgctgtggatgcggacttgacgagggagtcgcggtcagagagctcgatgggaatggccatggcgtggagaacctcaacggcgcgcgtggcgagccggtggagagcgtcagctgccgcggtagggtgggcaccagcagagagtagggattgagcacggcggagcagagatccggcgaggacaacgacggtagtggtaccgtcgccggcggcggcgtcctgggagcgggagagctcggcgagcatgcgggcggcgggctggaggagggacatgcgggagaggatggtggcgccgtcgttggtgatgatgacctcctgctcgccggaggagatcatcttgtccatgccacgggggccgagggaggtgcgcacggcgtcggcgacggcgcgcgcggcggctatgttaaggccgcggacgtcatcccggcgcttggtgtcggtgtaggtctcagtcttgcgggactgagcgggggaggcggcgactgcggtggccatggcggcggatcgagatggggcggggcctggcggcggagctctgggaggagcaacaatttcccttagggttaaattagggctttgtgctcttcagatgggcggcggcggttagggttatacgcgcttgatgggcctcagccatcacagatcaacaaatgaagctgatctatataggaataagttcaatttatctcccatatgttgaagccgagtttaaatttcatcctcgaaccgcaatacatatattacacatccctcaacttgcaaaccggtgtaatcgaggtttcaagcagtataatacccgggttttggctcacgtggcaagtgggacccacgtagacaccaatatattcaaaattaatattttgatattttttaacttcttcgatccagtgaaaaacatcgcacccacgtgtgtctatataggccaatattagtactaatagacgaaagttcgccgcgcaatgtaatggactcaaattttcagggaaaaatatttttgcgaaatattttagttgcactcttctcgattcttctattgaagtgatcttaccttctgttaatttcttttaacttggatttaaaactttatttgcaaagttaatcgctctcttttaaattttacaaaacctctctatttattttctttaatctctaactttggctctagattatatttcctttgattccattcctgaacatctccaacatccacaaataccaattcttattttcccctgaagcaatactttctttttgatctccactcaactatctccagaatacatgaaatgttgatacatttcctttggatctccacctaaatattcccagagtccctaaaaatatcctcttcaatccccctttgagtcaacatgcccatcctttagagtttatcaatataccaccaattctgttcctacaaaaattcccatccacatatacttccaaatccagttctatactcccacaaatattacccctttgaaatcttgttcatttaaattatccattcaagattacaaagtctaccatttagcttgggccaatatttccccgactctctattatatcccattaaccatttttatctttagggttaaaccagtataattccctttccattggaatttattttggatcaacccctatctaaacctatctccgaaaacctttgtctccttttaatccatccaaaatattctgtggccaagttcctattttgatccatccaccaatttgattcctatgacttgatcacattcttggcacaagaataatattatcacaaatatttgaatgattgctcttgtgctaagaaacttatttgcaatcccttctattcaaagtccaacttcctttagccacaaataattcactgagaatccataccacatattttggaggctaaaatcttagtttttacctccatctatttttgccaccatcccaaatttatccaaagttagaagttaaattattgtctttcctttccgtttgatttttaaatctttcgtgataagttttacatttggtccttatttgaattctatttaaattggagcatctttatttttatccttttcaaaatttatatctcaaaataaatatatttgattttattttaaaaatattttaaactcctttttgcttttaaaaaaaaactttatattcctcttataaagttcaaaagaccctcaagcgtttctcttttaaattttatctcctttaaaatttatttaaccctccattcaaaatccttagattcaattctttgactaagattaaaaaaattccacatccatctatcctttagtttccatctcctttaaattccattccaaatcctctatacaaaattatcaaaacttcctatttattttgggccaatttccctttcttttggcccattccccttttcttttcctccctccttcttgggctgccgacccaactgagccgaagcccagccgagcagggtctgcagcccagccgcctctctcctcctcccagtgcgcatgttgcgcacggcgcacgccgccgcaaactcttttccgtcgttgctaagaaatcggcgccgtgctcctcttctcttcgctgccgtcgccgtgccttagtcgctctccttctctccaaaccgacctccgcgacctataaatagacaacgaggtcgcccctctccctctccacaacggagttttccctttttctctctctactcccatgtccggccatcactaccgtcggccgatctccctcaccgaagcttcgcaagccaaacccttgcgccaccaactccgcctcgcccaggtgattccatttttcccctttcccctctccctccaccttgggataagccgccaccaccaccttctcttatcgctggaactgagctcttgttgccgccgttccggccatccctctctctccctccgccttccaccaccctctccgggtgcgcgttgctcgggaacaccatctcctaccggcgttcccacctcccggccaccggagagccggcgccccgctcgccctcttctctccctcctctcggatcaaagaagtagagaagaagaggaggtagaagagacatatgacaagcgggccccactgtacagtaatcccttttcttttatttgagttatttcaaattccaaactttaggcacccatatctctccaaccacaaatccaattccagtgaacctttgatctaaatccatctaatttcaaaccctcccttttgataccaaatttcctatttaaaattttgtttaaatacccttttaatttaaacctatttgatttatcttaaatccctataattttaaattttcttattttatttaaaaccatttttaaattaaattatctttaaatatctttaaatatcctttctttatttatttaattaccttttctttatttcttttaaaataccattttaaattttatttctttaatctatttttaaaaaaactctatttgaactcaaatttctttaaaccattcttttacaatccttagccaccaaaaagccgccgtggaaactttacaccttctatggagacgttcgcgtggtctcaaaccccgacgtcaaaccgttggtcgtaaaacccggcataacctaatcctaaggtcgaagtgtcgctcttcgcaccccacgcctcaacgcgtacagtggtcggagcctcactactccctcgacctccacatgcatgccgcacactagtccttgagctatgtgcgaccctagccgctctgttgtcactcacaactgcagagtaacactgttccgctccacacaaatctcctaactcactagccgttgtgctacttaactgtagcatcgactagacgagccgatatttagccgttatgctaccaaccttagcatcggctaactactccaaatatctaaccgtcgtgctactccattctagcaccgactagaaaaccaaatccaccaaatcaaccccacctatccattttatccttttcctcaattccaacctttagaaaccaaaacctctcttttgttttccaaactaaaatttattttgaaccattccttttttccttcgccttgctccaattttatttattccttggtttttatcgtttctttgtagcaatttgcttataggctttatttgctatcttttcgtattcgtacgttagaccgtacatcaagttttatcagcatccaaggagctgacgtggacccagatggctacgctaaagccgcgggaaatcttaaggcgcaaggcaagacatagctaaaattttgatcatatagaaaacttaatataatcttcattttatgcatgataccttacccttttaacatctcatgggtagatgttaaatgcttccaagtattattgcatgaggttataaaaagaagcattggttatcattttatgtgatttactattccaaacaactttacaaacttaggaatccggttaaaatgggcatttatgaattgagattatgaatgttgagaattatgaatgttgatgaatgatgaagtttgtgattttggtgtggggagtttggaaagttttgggtggtttaaccggattataattacccccttataccatggaaatgacatagtggcgtccatccacacaatcaagtaattgaacttagcctagtacattgtcccactatatgaaagactgttgggtggctctatgagcggtattggggtgaacttgcgtaaggagtttgggcggcagtgtttcacaacagtgggattcatgaaagtgtgacgatatagataccttgcctaggcctggcaagagttcgaccactatgatgaaccaagaccccactgtgcagtaactagtagtaagtgggaccttcgaacggctctgttgttctcagcctagctagctgtgggcatcgtgtgggtaaagctggacagtctctgcagaggtgaattaaatcattcgaatgtgccgtactcccgattctggagttgtgtcattagggtgattcctactcctgaagtataagcagttttaaaattaaaatgttgaggataaagatgatttatggtttttattattcctttactttattattgtttatttattcatatctattcacctttaattatttataatatgtcttgctgagtacataagtactcacccttgcataatttgacatatagagtaaatgtgctaacaaggagatcagaaggaagcgagatctacgacaacgataagtttttctaggatagtctacactcgagcttttgcctgtggagttctttgaaattctttggaatttattaattgtagttctagtagttgaataagtttaggagtttagtactttggattttcttgtatttcaaataaggatattttagtttggatcttttcaccttttaacagtagtataattagcttgtatgaacaaacctgtgtaaataattgaaagctgttctgtatatcaatctgtgcgtgatcgaaatcctggacgatcacgagtggatttttggggcaccaagcctaaattgggtgtccccacacgcaagccacataaagatttttcgaaacggacgcacctaacccactccaatatgtccaaaactcatggttttgtgctttttaaactttttcgttccggtgaaatgcattgcacctgccaatataaggcattaaaagacaaaactttgccatgctagtcatggagaaatgttttgaaacgaacacacccaatccactccaatatgtccataagtcatgttttggtgttttttgaatattttcgacccagtgaaaaacatcgcacccacgagtgccatttgggctaatattagcattcattgaaaaaagttcaccgcgcaagtcacacagagatttttccaaagggacgcacccaatccactactatatatccaaaacttatgtttttttttgctttttgaacattttcgttccgaacaaaacatcacacctatgtgtgctaatatcggcattaaatgacaaaagttcgcctcacgagtcacgaggagacgaacgcatcaaatccactccaatatgtccaaaactcatgttttggtgtttttaaactttttttagtgaaaaacatcacacccacatatgccaatattggcaccaattgacaaaaattcgccgcgcgagtcaaactgaacaaactcatcggacacgaagatcgaaacttgatcggttgtaatggtttgaggaatatcaaattggtaaattatatgctcttgaacaaattgtatagcatccccagaatcaactttcttcaaaggaatcgcctctacccacttggtaaagtaatcggttgccaccaagataaacttgtgtcctttactcgagagtgggttaatcataccgatcatatcaattccccaacctctgaatagccacggtttgatgataggattcatagccgatgctggtgctctttgaattgctccaaacttttgacaatcttgacatcctttataatacttgaaacaattctctagcattgtcggccaaaaatatcctacatgtctaagcaaccattttatcttatgagccgattgatgagttccacaaattccatcatgcacctcgccgattgcaacgttagcttgatcggcacttaaacatttaagcagcaccccatcaatcgtccgataatagagctcatcatccaacaaggtatacttcaaagccttatatcgcaatttccgagaagccgattgagatggattttgcagataatgatgcacatcatacctccaatcatcggctgttattgtggcaatttctactttgacatccttcatcatcggcttgtaatccgatgccccttaatcattagcttcaacattttgttctcaggatacatgcttcaaagtcactagctgaaatcctttcatcaattcttagcatttcccattgtaaaccattaatgtatcatttttgcactcatactctcctgccaattgattgatcaccagcaaagaatcacccataatctcaacagcatcggcttcaacttccttgagtaattgcaaccctttgagaaccgcttcatactcagcctgattgttagttgcataaagtttaatagtgtaagcaaactcaaaacttgccccccgaggggaaattataatcaagacgataccacaaccatgagtgcacaccgatccatcgaaaaacaaagtccagggcacaatatcaaccgagccgattgaattatcacgatgatcaacaataaaatcggctatagtttgccccttgattgccttcggcgactcataccgaagatcaaattccattaaggagaatatccactttccaattcttgctttcaaaatcggagccgataacatgtacttgaccacatcggccttgcatattacagtgcattcattggacaatagataatgccttaaccttgtataggaaaaatacaaggacaaacacaacttctccaccggagaatatcttgtttctgcatccaagagctgacggcttaaataaaacacaactctttcttttccttcaagctcttgaatcaaaaccgagccgattgacttctcaccagctgatagatataatctaaaaagtatccccttttgtggaggaatcaaaactggaggagagctgagatactctttaatactatccaaagccttctgctgctctgccccccaaataaacttttgattggctttcaacctcaacaatggcgtaaaaggctctaatcttccagacaaattagagataaaccttctaacaaaatttatcttgccgatcatctcctgcaattccgtcttgttttctagaggttgaattttcttgatcgcattaacatttctctgagttatttcaatccccctctcatgaacaagaaataccaaaaattggccagccgatacgccaaaagcacacattgtcggattcatctttaggccatacttcctagtcctctcaaaaaccttcctcaaattagctatgtggtcctctatttccttggatttaacaaccacatcatcaatatagacctcaaccaaccagccgattaagtcatggtatatgtaattcatagcccgttgatatgtagctccagcacttttcaggccgaacgtcatcacaacccactcaaataagccgattgcaccaggacaccgaaaagccgtcttatggatatcttcttcagccataaagatctgattgtaccctgcattaccatccataaaactcaaaatcttgtgccctgaagcagtatcaaccagttgatcggctcctggcattggatattcatcctttggggtagctttgtttaagtctcggaaatcaatgcacaccctgactttgccattcttcttgataactggaactatgctggaaacccactcgacatatcgacaaggacgaataaaatcagcatcatacagacgtttaatttcagctttaacaggctcgagcatatcggctttgcatcctctcgggggctgctggtgcggtctaacccccggtttgataggtagtcgatgttcaacaattgatcggctgagtcctgacatctcataatactcccaagcaaagcaatctctgaattcctttaaaagcactatcaacttggtcctaaattctggagacaaattcttactgataaatgtcggccttggtcgatcacctggacctatataaatttcttccaaatcattggccgacatgaaaccttgcccctgcttgtcatcgagatcatctactatgtccttggtgtagacatttgaaccctccacgacgccctcaaaataataacttgggctctccatcttcaattggttgtatatcacaatcggacacttttagaaaatctccttcccaaacttttccagacaagcaatcaatgccgtccatctcccaaagagctaaatcggcacagacaacgttaactgacctgtcggctggcacgatttcaatcttgttgccttgccattgaatcaagcaatgatgcatggttgaaggaatacaacaattagcatgaatccaatcccttccaagcaaaaagctgtaggaacccttcccatcgatgacaaaaaaaatattgtagggatggttttactgccgactgtcagctccacatttaaaacccctttggtttctgatggattgccaccgaaatctttgagaaccatgtttgtcttgatgaggtcttcagtatttctgcccagcttcctgaatgtagcatatggcatcaaattcacagcagccccaccatcaaccatcatcttggacatcggcttcccattgacatatccatttacatacaatggtttaagatgccgattctctgtcccctctggcttctcaaaaaccgcctgttctggtgacaaaaccaacctagccaatgcttcctcaacttcatcaacatcggcctgtttggctccaaattctgcaggcaacgcgaagaccatgttaaccgatgcagttacaacacttttccccttagccaatctttttgcttcatcagcttcgggttcatcggctacagcagctaggttcttaacacgccactcctaccttggctttgccttcttcagccgatggttgatttcttgctcaacctcttgaaagcgttccctgttcctcaacctttgaacccttctcttttgattcttcgtaaaaataccagaaggacaccattgagtttttctgtccttgtcgtcctcttggtcatgatcttgtttcaccgggcccaatttttgatgaacaggaacccttgtttgcctcagccgattatttttattataagatcggcccgaactttctgcaacattactgcacccagagcaatcctagatagatggcagcctcataccttcattccaacaaaatctgaaaaactcgcagccccaatgagggtcaaaaccaccatcatctccttcataatacctctcctcctgcttatcatacttcctctggtacttgttaataattttagccgaattcacttgaaaacctcgagtctttccttcatcgactgttcggctagctgtatgcaccatattgacaggaaaaggatcgccatcaaccttcatcggcttcttggagtcatcaaactttattttccctccctcaatagccgcctggatatgctgtctgaagactttgcaatcattagtagaatgagacccagagttgtgccacttgcaataccttattcctcagtcgatgggattgtatgaccggcaagaagttggatctgcttttcccgaagtaacagatcaaagatcttatcagccttggtaatgtcaaagtcatacctctcttcttttccagaacttctcacccattggcatggtataactttcttactcctaacccactcggctgctactacttcagaatcatcatcatcgtcatcagatccttacatgtaaggacatacgtaattgatctttttgaagctcttcttggcttctgcaaacctctgttcatgtaaggttactttctgtgcaagatgtgacaaactgtcaaactcttgggatgcgaatttctccttgattggagctatcagaccctgaaaagccaaattggctaactgggcatcagtcaaactcaaactgtagcacttattcctcatctccctgaatctctgaatgtaatcttgcacaggttcatcatgcctttgcctaattgctgttaaatcagacaatttcatctcatgaactccgctatagaagtaactatggaattacttctccaaattggcccaaatgttgattgatccatatggcaaagaagaaaaccaagtaaaagccgatctagatagagacaaaggaaacaacctaaccctcaaggcgtcgacagccgatgcttcaccacactgagctaataatcggctgacatgttcataggttgagacactgtcttgccctgagaattttgaaaaatctggaactttgtatcggttaggcaattgaaccctctcgaaccactcagggtacggatgccgatacaagtttcccgtgtcctttggcttgagcccgaactgctctctcatcacatctacaatcatatcggcccatggtctttggtgaggcaccccctgcgcttgttgtggaatgggctcgaactgattgtattgaggagcaaactgaggctgagccgatcctccttgctgatactgaacctgtggcgatggaggatgatattggtaattcaaattgccccttgataattctgaaagtttggctgtatgttgcataccaaatgtttaggaataacttgaggtatcactgattgatctagttgcacattatgaaccaaatgctttgagacaacttgatttgcaacgtgctgccttggttggttatcaggcgtccttaacccagccgatgcatttagcaaaccttgctgctgaatcgtctgattaatctgctgccttggtggcgtgagctgaatcggctattgctggaccaggtcaacagtaggctgagttggcagaaacatagcagcaacctgttcctgagtcagccgattcacattttgaccagcatgctgtggctgttctctagtcaacaaccaaggattgatcagttgccttgatgctgacgatggtgcagcaggtgcaggagtcgatactggcgctgttggctgagctggtggtgcattgggagcaatcggctgagcagtcggctgattattggtgatcaagggccgatagtttgagaaaacaccccctggtaaataaattggtcccgtagcctgatactcagctattgaaccatcaaccattgacttcaccatgtttgacaaggtattaactaacccccccagattgattaatcaaagcatgttgcacggcatagccaatccgatcttggaagttattaaactgtatctgtgctgtattaccatctgggctgagatcctcaccttgcaccccctgagaaccatcacctttatctcctgagccatctgcagcacctttaccacctgattcagctgtgccagctgggatttgttgtacttctccatccttggaagaacttgtcccaggaacatcagcaactaatttcgtcttgtacctttgaacaattgttcatttacgggtctccataaatgagttcaagaactggtgttgtgtttgctgcatcatcagatcgagctccttcttttgctcaggtgttagcttgtctacagtgatgggaacaatgtttccctcattaacttcaaacgcactagactttagattattagtcttggaagggagctctttgccagccgaagatggcgacggtggcaatttttcagccatgaggaaatattattgcgattctgacttctaatcggtcccacagggcgtgccaaaagcgtgttgatataaaaacacgaggcctgggagatctgcttaactctagtgcaggtccaaaacttacctttaggtgtatgagcgtgccagttgatttgatcctacaatcgacaagaaacaaagacaaagaaaccgcggttaaatccataaaaaatagccgatcggctagttgccgatgacatatcatttatctctgagccgatgtcatacgtgaatcgattggcaatcatgaataagtaagaaataactaaatctactcgatcggctatagatattaacaatatataatccttatgtcgatatatacttacatcaagtgattgggatagatcggtcgccatgccgagacagtataaatcacttggatcaaaatatatattaacaacaagactatatatgttcatagcatagccgatcagatagatctagcatgtatcggctaatactccgataccactctatattaagatatcaaagcaagtagaatataccaaacagaaaggcttaatatacttaaatgcaacaagatcttaacataaagggcagatttaacatgtcaatcaagcatataagataaatatagttaaatcaggtaagatcggctgaaaccctgatgctaccctaatcggcaaccaaaagcaggctagagattgagattctaatcacgactcataagatcaaacctaactgatgcagctataagtatgaaaagaaggacaacatctagacaatcaagccgttgggtgtttctagtacttaacctaatagagtggtagatatcctatataatctaagtcaatgtcgatacttaacctaatcggctgccttctagtaacggatgttagccgattagaggttagatagcgatattgccagagattatataagatatatgataactcgtcgaaacaaaacgaaaggaaaagggtggcgatgcgttgagattgtattgaacgtgtgttagttttattacatcgggctcgggatctatttatacccgagattacaaaatatgtccatatcggacatgactcttatctctaacaaactctaagataccataagtctttgctgcagacttttgcccaaacatatctccaagaaaattacatgaaatatcctaattaatagatacaattgccttcttaggactctatccatgcgtggcaattctcatgaagtacataaacccaacccgacaatgtatgccgtgtcatattgttggattcggcacaatcggctaaacccgtccaactcggactctgccaatattgatcgcagccgatttggactccagccgatccttactctgtttccggaacgatctccatctcgaactccgtttcgatttcctcttcatctccaatacttagattaccaaattttgtcgttaacacacacgtgggtgcgatgtttttgaccggaatgaaaaagttcaaaaagaaccaaaaaatgattattggacatattggagtgtattgggtgcgtttgtggcaaaaaatcacttcgtgatctgcgtggcaaacttttgtcaattaatgcaaaaattggcatatattggcacatgtgggtgcgatgttgttgaccggaatgaaaaagttcaaaaagcaccaaaacattatttttggacatattggagtgtattgggtgcgttcgtggcaaaaactcacttcgtgattcgcgcggcgaaattttgtcaattaatgccaatattggcccacacgggtgcgatgttttctaccggaatgaaaaagttcaaaaagcaccaaaacatgattttaggacatattggagtgtattgggtgcgttcgtggcaaaaaatcacttcgtgattcccgcggcgaacttttgtcaactaacgccaatattggcacacgtgggtagaatgtttttgaccggaatgaaaatgttcaaaaacctccaaaaagtgatttttggacatattggagtgtattgggtgcgttcgtggcaaaaaatcacttcgcgattcgcgcgacgaacttttgtcaattaatgccaatattggcacatgtgggtgcgatatttttgaccggaatgaaaaagttcaaaaagcaccaaaaaatgatttttggacatattggagtgtattgggtgcgttcctagcaaaaaatcacttcgtgattcccgcggcgaagttttgtcaattaatgcaaatattgacacacgtgggtgcgatgtttttgaccggaatgaaaatgttcaaaaatctccaaaaaatgatttttggacatattggagtgtattgggtgcattcgtggcaaaaaatcacttcgtgattcacgcggcgaacttttgtcaattaatgctaatattggcacacgtgggtccaatgtttttcaccggaatgaaaaaagttcaaaaagcacaaatacatgatttttggacacattggagtgtattgggtgcgttcgtggcaaaaaatcacttcgtgattcgcgcgcacgtgggtgcgatgtttttgaccggaatgaaaagagttttaaaaacacgaaaacatgatttttggacatattggagtgtattgggtgcgttcgtggcaaaaactcacttcgtgattcgcgcagcgatcttttgtcaattaatgccaatattggcacacgtgggtgcgatgtttttgaccggaatgaaaaagttcaaaaagcaccaaaacatgatttttggacatattggagtgtatttggtgcgttcgtggcaaaaaatcatttcgtgattcgcgcggcgaacttttatcaattaatgccaatattagcacacgtgggtgcgttgttttttaccggaatgaaaaagtttaaaaagcacaaaaacatgatttttggacatattggagtgtattgggtgtgttcatgacaaaaaaatcatttcgtgattcgcgcggtaaacttttgtcaattagtgccaactagtaatatacccgtactaacgttacggtgccatgatatttgtttaatctaacctacatggaaattgaagtttgttctcagtcattctacattagaataaccaagctaggaagtcaaccgaacatgtctcatcttagagtcgagaaacacctagagatcttccgactagctacacaaggttgggacctaaagtggactttttccaaaggaaatcatctcggatgttgttccgagcccaacgaggttgtgagcaagcaaaaacttggtctgttttggtttgggcaaccctagtacgtgttcaatttcgctctcaaatggagagcacttaacgatgtatataatttttagctttatattgccatcttgtcgtctcaaactatatataattagacaattaaattataggaccaaatatatataactcagccatcacatattccgtgaagcaacatcatcacattataatgataagtgttgactgtccaagcatctcactgttactgcagtctcaaactctcaactattgttgccatactaaattggcatcaataaattgacccagttactatctggaaattctcacattgacattcaattatcacattcattatttatgcgcaacctagattcacgtcaattttcaatatcaattcacaattaaattttataagcatgtataaaatacagaccaacaaatcctcaggtttccacacaagacaaaatagttcaaccaattgcatcacatcatgccagtaatcaaataacaaaaatctaaattggttcacacatcacttatatatcaatacatgataaaaatatatcgcacagtgaagggtaagggagaagagatcaaactaaaggcaagacaatatgggcaaaacttacacgagcagattttaaaaagttcccaaaatatcatacatgctgacaaacatgcatacacctaaattcacatggagatgtttgtacccaaaaatagaaattaaaattcgtaattgctgacagatacacttgagcctaacatgcctgacatatcttaagggttgaacacaaatccagtgaatccctcacatagccataactatgacctatatgtacattccttcctaaacgccatatatcatctagataagaaaataaattacagatacaagaggtgaactcaaaccattgcatattgttgatctgtgtatgtgtagcatgaatggacttatgtgtggcatatccaagtgagtagtaatattagcagcaccatgcagataattagctagattgaaaggatattttgtgtatgtaattcttgaattatggatcccataaatattacagggtacattcttttaacgtgtatatggaagctcataggagcaatattgctataaaattggcaggaaacaattggatatataataatctgaattaggaaacaacatgtgcataaaggtacataaataataaattggtcattagttaaatacacattgtcctgaataagcattgagaagattattcggttatagaattaactatctcatcaaacagttgaaaacaagaaacatattaggattccttaggagcatcacatatgaaagcatcaagttaataagctcgaaagccaactaaattgtacgatgcattctcaaattaaatctagttcaatttcatgagaacttttcaccctgcacaaagatgatgttagagtaatcgaaaataatcaatagggtaaaatggcttgttttctgaatgatgcaagtggcaaagggaaaaccttggtggcctagctcgcaatgctgtctgaagttgggtggctttgactttgccaacgtcaatggcttactgctctcgctcttcaagattgatttaactttcagtaatgcgaaaaatttaatttttaggagattaataagaattgacatcctgacattaagcacaaccaggttaagtgagcttaccctgacagtcccgactgaagaagcttctgagaacatgtgtctgcatgtcgcgtagctctcactatcattttaagatgaaacaaacatttagttaatagtcttcagatccaggattgagtagttagtaatgatcaaactaaggtaaacgaattctcacttttttgttaaatggtcgtgctctgaattttgggatgttggctagcatctcctcctctagctcagcagagcttttcactcttgactgcacggaccctgtgggaggtctaacaaagggaaaccattagttttcacgtcgaacccacgtcacaaagtagaataaattacaatgttatatatttgacattttacatttataaaacgtggtaaatggtcaaactatcatttctctccaatgtctcaaattaaagctgcaatatatatacaaaacacattgtggcttaaggcgtttttctgttgcacttgaggagtgacagatggcttttgttcagacctaaccaacatctgaatagaaaatatacctgcttacatttgttactctagccctcaggccctcatgaggctcagccatgcaaaatggatgttagctactgttgaaactttcttgaggtactgaacagtaagagcatttcagagaatttgcactcaacctcaaatgtgactttctgacaatctccacatacacatacaaaaaagagagaaggaatatgtgctacagtactcttattatgcaacacattgtgggctggctgaacgaagaagtaaaaattgcaacaaggtgcacacatcaaaaaggataattggatgcccaaaggccacctcataaatcttgtagcagaggcagaaaatagcatgagtgggggtaaggatctatcgcttaggtagactaaggaagtaaaaagtgtcaagcgggcatttgcccccactcgttgcaaaattgagtgggggccaaggcccccgcttgttacactctagatccgtccctgatataatccttctctatggataaaacatgccataacagatatcgatcttatgcacataaatatttggaaatgggtgtaaacaaaaaggaagagggcatcagtcatatcctttgttgtcattcttcctacatcctgagataacgagcattacctgaccactacacatgtggtcattcttcctacatcttgagataacgagcattacctgaccactacacatgtcgatacacgtgcaatcggaggccagtaagggcacctacaacggcgcagcgaccatggcaaagccggtaaggggttgaacttttcaccctgcataaagatgatgtgagagtaatcgaaaataatcaatagggtaaaatggcttgttttctgaatgatgcaggtggcaaagggaaaaccttggtggcctagctcgtaatgctgtctgaagttgggtggctttggctctgccaacgtcaatggcttactgctctcgctctgcaagattgatttaactttcagtaatgcaaaaattttaatttttaggagattaataagaattgacatcctgacattaagcacaagagcttaccctgacagtccccactgaagaagcttccgagaacaggtgtctgcatgtcgcgtagctctcaccatcgttttaagatgaaactcctacaggcattggaaaggaataactgaattacccaaacaaggttgtcacctatcactcataaatttctaatgatgaaaaaaaattatgttcactgaattcaggaagatgtggagctttccttgaaagaggaggaaataaaggggcctcagcaataagcaaacatttagttaatagtcttcagatcctggattgagtagttagtaatgatcaaactaaggtaaacgaattctcacttttttgttaaatggtcgtgctctgaattttgggatgttggctagcatctcctcctctagctcagcagagcttttcactcttgactgcacggaccctgtgggaggtctgacaaagggaaaccattagttttcatgtcgaacccacgtcacaagtagaaaaaattacaatattatatatttgacattttacatttataaaacgtggtaaatggtcaaactatcatttctctcaaatgtctcaaatcaaagctgcagtatatatacaaaacacattgtggcttaaggcatttttctgttgcacttgaggagtgacagatggcttttgtttagacctaaccaacatctgaatagaaaatatacatgcttacatttgttactctagccctcaggccctcatgaggctcagccatgcaaaatggatgttagttactggctactgttgaaactttctcgaggtaatgaacagtaagagcatttcagagaatttgcagtcaaccttaaatgtgactttctgacaatctccacatacacatacccaaaaaaaagagagaaggaatgtgtgctacagtactctaattatgcaacacattgtgggctggctgaacgaaaaagtaaaaattgcaacaaggtgcacacatcaaaaaggataattggatgcccagaggccccctcataaatcttatagctgaggcagaaaatagcatgagtgggggtaaggatctaccgctaaggtagactaaggaagtaaaaagtgtcaagggggcattttcccccactcattgcaaaattaagtgggggccaaggcccccacttgttacactctagatccgtccctgatataacccttctctatggataacagatatcgatcttatgcacagaaatatttggaaatgggtggaaaaaaaaaggaagagtgcattagccatatcctttgtcgtcattcttcctacatcctgagataacgagcattacctgacctctacacatgtcgatacacgtgcaatcggaggccagtaagggcacctacaatggcacagcgaccatgtcaaagccggtaaggaggcatttggaggaccacggttatggccgcgaatagcctctgcctgactgcaaacatctgtgaaaaattctattttgattcgattgtgtcgccgtggtggagaaggggggcacgggtgtaggttttcaatgtcagtgcgagagatcgagaggatgggagtgcggtggggagggggtgcgcgaagatgggcgcgtccgtgcgggagaggaggggaagggaggctgaacgtgggacgatctggatcgttcgattgcacgtggatgaactgcgaaaaattctattttgattcgatggtgtcgccgtggtggagaaggggaggcacgggtgtaggttttctatgtcagtgcgagagagatcgagaggatgggagtgcggtggggagggggtgcgcggagatgtgcgcgtctgtgcgagagaagaggaggggggcacgggtgtaggttttctatgtcagtgcgagagagataggtgcatccgagcgagagaggaggggaagcgtgcgagagcggaggggaagggaggctgagcgtgggacgatctggatcgttccattgcacgtggatgaatacggtgtgttgaatttgatgaatgaaatatgaaggatgtaagaggtagttggtgaattatagggaagatattggcagacgtgggtccaatgtttttcaccggaatgaaaaaagttcaaaaagcaccaaaacatgatttttggacatattggagtgtatagggttcgttcgtggcaaaaaatcacttcgtgattcgcacggcgaggttttgtcaatgaatgccaatattagcatatattggcacacgtgggtgcgatgtttttggccggaatgaaaaagttcaaaaagcaccaaaacatgatttttgtacatattggagtgtattgggtgcgttcgtggaaaaaacacacttcgtgattcgcgcggcgaacttttgttaattaatgccaatattggtacacgtgggtgcgatgtttttcaccggaataaaaagttcaaaaagcaccaaaacataatttttggacatgttggagtgaattgggttcgttcgtggcaaaaaatcacttcgtgcttcgcgcggtgaacttttgtcaattaatgccaatatttgcaaatattggcagacgtgggtacgatgtttttgaccggaatgaaaatgttcaaaaagcaccaaaacatgatttttagacatattggagtgtattgggtgcgttcgtggcaaaaaatcacttcgtgattcgtgcggcgcagttttgtcaattaatgccaatagtggcaaatattcgcagacgtgggtgcgatgcttttgaccggaatgaaaaacttcaaaaagcaccaaaacatgatttttggacatattggagtgtattgggtgcgttcgtggcaaaaaatcacttcgtgatttgcgcggcaaacttttgtcaattaatgccaatattggcacacgtgggtgcgatgtttttgaccggaatgaaaatgttcaaaatgaacaagaaaaatgatttttggacatattgcagtgtattgggtgcgttcgtggcaaaaaataacttcgtgattcgtgcggcgcagttttgtcaattaatgccaacattggcaaatattggcagacgtaggtgcgatgttttttaccggaatgaaaaagttgaaaaagcaccaaaacatgattattggacatgttggagcgtattgggtgtgttcgtggcaaaatatcacttcgtaattcgcgtggcgaacttttgtcaattaatgccgatattggcagacgtgcgtgcgatgtttttgaccggaatgaaaaagttcgaaaagcaccaaaacatgatttttggacatattggagtgtattaggtgcgtcgtggaaaaaaatcacttcgtaattcgcgcggcgaggttttgtcaatgaatgccaatattagcatatattggcacacgtgggtgcgatgttttttgtcagaatgaaaaagttcaaaacgcaccaaaacatgatttttgtacatattggagtgtattgggtgcgttcgtggaaaaaacacacttcgtgattcgcgcggcgaacttttgttaattaatgccaatattggtacacgtgggtgtgatgtttttgaccggaatgaaaaagtttaaaaagcaccaaaacatgatttttggacatgttggagtgaattgggttcattcgtggcaaaaaatcacttcgtgcttatcgcggcgaacttttgtcaattaatgccaatatttgcaaacattggcaaatgtgggtgtaacgccccgattttcgttcgggattaaaaatcaattaataatgcatttctagaaattatattaaaagttaaatcaatttaatcaagtgaaattatagaggaaattaaaatttcctttaaaaaaatctttggccgggaatattttgtaatattctttgtgccctaatgtactctccggaattttccgagaattttcggagctcgagaaatagttttaatagcacaaagatcattgcatcaattaaaataaaaagaaaaaaaaatcctccttcctctctttgggcccctttcggcccaatccctcctttctctcccgcggcccgcgcgccccttatctctccctctcgggccagcctcctccctcggcccgctcgactctctctccctcaagtctgctttacctcccttgcccgttttcccctctctctccccgacaggtgggacccgaggccccatctgtcatcttcttctcctacctccagctccatccccaaccgctgccatggctgccaaatcctcccacgtcgccgcctctcccgcacgactccctctcccgcgcatgcgtggacgcggtcgtcgcccacgtccacgccgtttccccccactctccccgcaaaatccggccacgtcgccgcctcccgcatctctctcctcccacgttgccggccggtttctacctctctcgggcccgatcccgcctcccctcccctataaaaacattccccacacctccctgtccattttcccctctctcccgagccctcccgtgcacgaaaaccaccccgccaccgtcgcacctcccgccgccgctcgccgacgaccctccagccagtcgccacagccgctcccaccaccgtcgttccgcgcgaccgccaccagcggcttcgccgcgtcgtgccacaccccggcgtccgctccatttcccctccccgcctccgaagcactgtcgccacgcgcaccacctccttccaccgaagccgccgactccagccggccgctgccgccgctaccgctgtccccgagccgcaccgcttgcatcgccggcctcgccgcgctttgccgcatcccgtccaccgctccgcttccgcaataaaccacccgggcaccgattccaccgtgaacccgagctccaccgccactttgccgactccggcagcgcgccaccgccgccctagccaccaccaagccacgccaccgcctctactgcgttcgccgcgctcccccataccccggccgctcctccaccttcgttcgagactgccgaatcgccgccgtcgtcttcgccccgtggagcgccgccgcctccctccgcggccgctccctccgtcgccgcgcctctcggtgagccgcctccctcctccttttcctcttcgccggccgcccgccgccgttccatgtcgctagctgctgccgccggtggccgcatgccgccgccgcgccttggctcggccgggccggctttgtgccgcgcctgtgcccctggctaccgctcccctcggccgcccgatcggctcaggccgatctgggccgtccacgtggtggacgcgcacccgaggccacgtgtggaccatgtccaccgtgcgccctccccctttgactcgctgacatgtggggcccacgtgtcggcgccggccgccccttgcagacgtcagcgaggtccatttcctttgtaaaattaaataataattgcgcaataaatcgagtttaattctagaaattcatttaaatggctcaaaacttctaaaattcatatctaattcattcgaactccgaattgagccattcaacttgcaaaattcatctaaaattgagctctacatgtttgtttactttttatgtactgtttctttggtttttattagagtttttcctcgttttgcgtgccagcgtgtagttcccgccgtttcggaagatcgcggtcgcaaggataagagttcggaagattgtttgaagaagaaaggcaagtcacacattccccttgagcatgttgatcctaatttacaaatgttttactgtttgcaaataaatatgcatattttgctaattacatggggtcagggttttacctatctgctcgcttgtgccatgtttacttgatatctgtcctttgtcaaccatgggtaataaatcacctagcttgtgttactttgatgacctagctagaactatatgcttagccatgcttaattaccactagctcagtcgatgggataattgcagtattagacctttttagtatcagagtgagctgcgtgctcgagacatctggccatgcttcatggtcgtaattatccaactaaaatgcaactgaatggtgggctgtgggtgcatggttttgttggtcgcacccatggcagttaaggaccggttcgcgggatgccctggaagaacttatcatacttaccacaagccagcgtgggcaacggctgggcttgtagtgtagctttcctctagccgacgcatccaggcaagggtgggcgtgatggagtttggatgggccctgcgacggcctatgcggcttccggattcacctacgcacgagaggggactgcccgctgccttgcgaggagtgggggtgaaacctgaggtgtggtgtgcttggttagagggggttatgcgaagggtcctgtcacggcctctttccggtatgtcgtggtggcatgtcggcgcacggaaacgtgtcgtggggctgtgtcttgtgggtacagttgtacacctctgatcagagtaaaactattcgaatagccatgcccgcggttatgggcggtcgaccagattcaccgtgattagtcccgtcttaataaatcgatccaatacactgtagttcaggtgggttggttgggcctgttcaatgtggtgtagcgttgatcagtggagatttaatgttactttaattactcaacagttttactgttttgctcaataaaatgttttacaactgcctttatgcaaatagccacaaacccctccttgtatccccttgcacgtctgcatcgttggtgtggcttgctgagtacggtggttgtactcagtcttgctattattccccctttttcagaagtgtagtgcttctgagctgaagatggagttagaggaccaaggctcagaccccagttgagttttgcctgtggagtggagctgaagccctgctaggatcgcctttttccgctgctgctgctttcgtttcggtgcgaggactaagtgcctcttttgtaagtattttacgctttatttacgtttggaactgtatattacttgtcgttttgtgtaccctggctggtcctggacagggatttaatacgcaaaatagtctggaaatttgggttaaatttctaggcgtgacaaagtggtatcagagccaactcgactgtaggttgagccaaatggtcaaaccgtaaagacaagttttctgaaaaccctatttgcaaaatgtctcctctcgcccttcggcatttctttgtcaaacggtttttcaaaattctcctccctgtccctccaattcttttagtgtcaaacgtggagggcaaaccgtcagtttcgtgtctgttcagaagtcaaatctcaagcttcgcgcagaaggagcaagaagatcagcccagagtcgtcgtcccgcgaagatcaagaagagttttcccgaagtttacctaaacccaatccttccctagagggtagtttcgttagcttctagatcgtgtgttgcttgcttgtgtgtaggggtatggtttgcatcattggtggggatgcgaccatactaggttgtttgcttaaacaacttgaatcataaaatccattcacaacagatcaataggcaagtggtttagtacctcatctctagtaacccctcctttttccccctccctctggtgcctgcagcagatggtccgcatgagggacaatttcatcggatcaagaccccgttagtttcatggggcaactcagtgcaattctaatagtattccacgtcagcctcttgaagatcagcctcaaccccaagtcatggctaatcaaactcagacagtggaagagttgttacaacagatgcgacgttggtaccaaatataccagatgcaacagatgcaacgacaatgtcaggagtcacgtcaatgtcacccaccgccggtgcgagatcagatgccagcccggaacccgaatcagagtcagagtcaggagttcccaatatcggcaccgaagacccatgtcaaaatgcggtccagatccccgaagataacgacagccaagtcaacgtcagaccaaaggaaagtaagtgctacctgttatgactgtggtgagcaaggtcattatgtaaggaactgtccatggaaggtgttcgctaggtcacctgaaaaagacgagaagcagtgcctagggagtaaccaagctccaagtcagtctaccgacaagaaggatggtactttgcagcccaactctggagcgaacaggacagtgatatggaagatggataatggcaggaccatgatcatcgccggttcagaatttactcctgaagacgcagcaaggatacccaagcgtcagagaggaagaaataccttccgaggagcgcgtcagctaacccgtcatctcataaagtacggtccgcccagacccaaggatgatgaatcaggagaacggttttctgctgacgacgatgacgacaacgatgatgataatgatgacaatgatgatgcgacctttaacagtttcagggaaagagagttgaagttcaaagcatgtgctagatgtgggatagtcggacacactgctagtttatgcctccccacatgccgctgtggtgaatatacccattactcagatgcatgccctttaaggaagatcacatgtttcttgtgtgaaggaacagatcatgtgcctaaggactgtcagttgaacgcggtcatagctaagaccaagaaagaacaaggggcaaccgtgcaacccattcgtcaaccaatggcaatcgacaacagcggtcacaatccttctgctcttcctccaattccacccccggtggaagccaaccatggaagaagcaacgtcgctagggatgttcataaatcgctgcttgttccagtttcagctgccaaagtgcataatcagaagcctgcaccccgggaccaagcaagtcgattctgtcgcaactgtcgtaagccaggacattgtttcagtgattgtcctcttccaagagcagcaaaggcagttcgtcgtgatccacaagttaccagcactgcccacgaccccaatcgacacctgaatgtgcaacctccgcctcaacggatcatcgtcaagggcaccgtaagaggccgcattgttccaccggccatcgtttcaagcctacagcaccagcgccagcagggtaagcaatgctaggagaacaacagctcgctacagttacaaagaggcagtatgctccttcgttagcacccgcagcaagtgtcgtcagcaccaggtcgctcgactgttgtcagttctagcaatgcacctcgtattgctccaatccggaggcccatcgacaaaccaccgctcggcaaccccgcgagtaagaagtcccacctgctacggcagtcaagagagttgttactccaccatcgaagaccaacaagcagagcaacgttcccggtgagacttcagctagtaggaactaaagggacaagtcagtcaggtttgaatgatggaagcaacaatagttccagtcaagacctctacttttcaggtctaaaaggcagttctaatcagcagcagtctacaatggtttgattttgtagtacttctcattgtacatatatgtttatggcagccatgtaatgaaaaggaaatattgaataaaatatgagtcagccagttcctctccttttatgattcatcttgagcatgtagaagcaatttaacatgtgtatctgccagtgccacaagaaaccaagagtttctcttctaactcatcgcaattttgttgagctccaaaacctgtttgcgagccaatagaggaatggttaaccaacggagtgaaaatggttagaccctcaacactcgacatgatgaggtctctctaaaggcagcctcagtggtactcaaatgaaaagagggatggaatatttgaaagtgacaatggttggatccatggcgctcgacactatgaaatctctctaaaggcagtaccaagggtattcaagtgtaaggagtaacgaaaaaaaatatattcggaagtaacatcatacaaggaatctctagcctcggaaactgttagagaatggtaagcggcaattacaccctagtggtgtgattatgaaacaagaatggtttccatagttcaaggcaaccgctataagttccagaaaaaaattctcatgaggtttcccagaagttgaaagagaaattgttccaatacatgggtcagaagtatatagagtcgagtccagaaatgtgtagtcagtagggtatatggtagagaatcccttttcaacggaacatctttaccgaacatatgaaggcgaagttgttatgatcaaagaacaggaactctcggcagcatcaaagtcaatttccggcagtcgtgcagactatagtatttttgcgaaagcagttgcagggtttacagttcatcaatccaggaagagtcaaaaaaaaatcgacgtgtggggttatgtcatgagaaggactcttgattttgatccgttaagtggtcaatgtgtgcttcaaagaatgtcgactatgcaatatgtccaagcatacgacaccgacgtcagtccagaagcatgctagttatgccagccgtagaactgatggggaagtagtcaagagttataaagatcataagctaaatgagaatttccttatgtggaatttcctatcagcaactgagggttaagttccaaatcttaatgggatgaaagtgcatcgttgttactctattttgatcgatcggcgaagtttttagttttcaaagtcagggctcttcgcaaaacagagaagtgttgaatatatttgaaggacaacagttcaaccgatcccagccacgcgaaagtaagactactccctgtaaggggggtaggtctcggagaagagttttgcctcacttcgtcgctgttttagttgaaggctcaaccagtgccgcaatcagggtagcacttgaagaagcatgttgcaaggtatcagaagaattaagccgatccccgggcaaccgattgaattctaaggtacacccatgaggccagttcaaccgcttagcttagacaggtcaagcagacggttgcagttcagacaaaagacaggtcaagcaggtttcctggaattacttgtcattcgagccaggaccaattcaagcggacgtaggatcaatgagttacaaatgccagatgcaagattcaggaacaactccatccttctctagccaacttggtgaactgtcatgttatcaagttgctagcatcaacagttcatcccaagataagaaagtttcacgagcatccgcagtcctagtctgggtcagttcaagcagaaccaatccgttcagttttgggagcaacaggaccgcagagctgaaaccagccagatcactcgtacagagtttagtcttgtggggcgccagaactccaaggtcgaatccaatgaggccagtcagttcagttgtttggagcaaaagaacagaatggtcaatgccggtcagttcagtcgtgcaggtttggaccattgaggaatcggtcagttgaatcagaaaggaacaatgcagtgtgcaaatcagtcagaccgcctgccagccccagtttttctttctagccatcccagaatctcgggacgagattcctgtaaggggggtagatttgtaacgccccgattttcgttcgggattaaaaatcaattaataatgcatttctagaaattatattaaaagttaaatcaatttaatcaagtgaaattatagaggaaattaaaatttcctttaaaaaaatctttggccgggaatattttgtaatattctttgtgccctaatgtactctccagaattttccgtgaattttcggagctcgagaaatagttttaatagcacaaagatcattgcatcaattaaaataaaaagaaaaaaaatcctccttcctctctttgggcccctttcggcccaatccctcctttctctcccgcggcccgcgcgccccttatctctccctctcgggccggcctcctccctcggcccgctcggctctctctctccctcaagtctgctttacctccctcacccgttttgccctctctccccgacaggtgggacccgaggccccatctgtcatcttcttctcctacctccagctccatccccaaccgccgccatggccgccaaatcctcccacgtcgccgcctctcccgcgcgactccctctcccgcgcgtgcgtggacgcggtcgtcgcccacgtccgcgccgtttccccccactctccccgcaaaatccggccacgtcgccgcctcccgcatctctctctcctcccacgttgccggccggtttctacctctctcgggctcgatcccgcatcccctcccctataaaaacattccccacacctccctgtccattttcccctctctcccaagccctcccgtgcacgaaaaccaccccgccaccgtcgcacctcccgccgccgctcgccgacgaccctccagccggtcgccacagccgctcccaccaccgtcgttccgcgcgaccgccaccagcggcttcgccgcgtcgtgccacaccccggcgtccgctccatttcccctccccgcctccgaagcaccgtcgccacgcgcaccacctccttccaccgaagccgccgactccagccggccgctgccgccgctaccgccgtccccgtgccgcgccgcttgcatcgccggcctcgccgcgctttgccgcatcccgtccaccgctccgcttccgcaataaaccacccgggcaccgattccaccgtgaacccgagctccaccgccactttgccgactccggcagcgcgccaccgccgccctagccaccaccaagccacaccaccgcctctactgcgttcgccgcgctcccccgtaccccggccgctcctccaccttcgttggagaccgccgaatcgctgccgtcgtcttcgccccgtggagcgccgccgcctccctccgcggccgctccctccgtcgccgcgcctctcggtgagccgcctccctcctccttttcctcttcgccagccgcccgccgccgttccacgtcgccagctgctgccgccggtggccgcatgccgccgccgcgccttggcttggccgggccggcttcgtgccgcgcctgtgcccctggctgccgctcccctcggccgcccgatcggctcaggccgatctgggccgtccacgtggtggacgcgcacccgaggccacgtctggaccatgtccaccgtgcgccctccccctttgactcactgacatgtggggcccgcgtgtcggcgccggccgccccttgctgacgtcagcgaggtccatttcctttgtaaaattaaataataattgcgcaataaatcgagtttaattctagaaattcatttaaatggctcaaaacttctaaaattcatatctaattcattcgaactccgaattgagccattcaacttgcaaaattcatctaaaattgagctctacatgtttgtttactttttatgtactgtttccttggaatagagtttttcctcgttttgcgtgccagcgtgtagttcccgccgtttcggaagatcgcggtcgcaaggataagagttcggaagattgtttgaagaagaaaggcaagtcacacattccccttgagcatgttgatcctaatttacaaatgttttactgtttgcaaataaatatgcatattttgctgattacatggggtcagggttttacctatctgctcgcttgtgccatgtttacttgatatctgtcctttgtcaaccatgggtaataaatcgcctagcttgtgttactttgatgacctagctagaactatatgcttagccatgcttaattaccactagctcagtcgatgggataattgcagtattagacctttttagtatcagagtgagttgcgtgctcgagacatctggccatgcttcatggtcgtaattatccaactaaaatgcaactgaatggtgggctgtgggtgcatggttttgttggtcgcacccatggcagttaaggaccggttcgcgggatgccctggaagaacttatcgtacttaccacaagccagcgtgggcaacggctgggcttgtagtgtagctttcctctagccgacgcatccaggcaagggtgggcgtgatggagtttggatgggccctgtgacggcctatgcggcttccggattcacctaggcacaagaggggactgcccgctgccttgcgaggagtgggggtgaaacctgaggtgtggtgtgcttggttagagggggttatgcgaagggtcctgtcacggcctctttccggtatgtcgtggtggcatgtcggcgcacggaaacgtgtcgtggggctgtgtcttgtcggtacagttgtacacctctgatcagagtaaaactatttgaatagccgtgcccgcggttatgggcggtcgaccagattcaccgtgattagtcccatcttaataaatcgatccaatacactgtagttcaggtgggttggttgggcctgttcaacgtggtgtagcgttgatcagtggagatttaatgttactttaattactcaacagttttactgttttgctcaataaaatgttttacaactgcctttatgcaaatagccacaaacccctccttgtatccccttgcacgtctgcatcgttggtgtggcttgctgagtacggtggttgtactcagtcttgctattattccccctttttcagaagtgtagtgcttctgagctggagatggagttagaggaccaaggctcagaccccagttgagttttgcctgtggagtggagctgaagccccgctaggatcgcctttttccgctgctgctgctttcgtttcggtgcgaggactaagtgcctcttttgtaagtattttacgctttatttacgtttggaactgtatattacttgtcgttttgtgtaccttggctagtcctggacagggatttaatacgcaaaatagtctggaaatttgggttaaatttctaggcgtgacagtgggtgcgatgtttttgaccggaatgaaaaagttcaaaaagcaccaaaacatgatttttggacatattggagtgtattgggtgcgttcgtggcaaaaaatccgttcgtgattcgtgcggcgcagttttgtcaattaatgccaatattggcaaatattggcagacgtgggtgcgatgcttttgaccagaatcaaaaacatcaaaaagcgccaaaacatgatttttggacatattggagtgtattgggtgcgttcgtggaaaaaactcacttcgtgattcgcgcggcgaacttttgttaattaatgccaatattggtacacgtgggtgcgatgtttttcaccggaatgaaaaagttcaaaaagcaccaaaatataatttttggacatgttggagtgaatcgggttcgttcgtggcaaaaaatcacttcgtgcttcgcgcggcgaacttttgtcaattaatgccaatatttgcaaatattggcagacgtgggtacgatgtttttgaccggaatgaaaaagttcaaaaagcaccaaaacatgatttttagacatattggagtatattgggtgcgttcgtggcaaaaaatcacttcgtgattcgtgcggcgcagttttgtcaattaatgccaatattggcaaatattcgcagacgtgggtgcgatgcttttgaccggaatgaaaaacttcaaaaagcaccaaaacatgatttttggacatattggagtgtattgggtgcgttcgtggaaaaaaatcatttcgtgattcgcgcggcgaacttttgtcaattaatgccaatattggcacacgcgggtgcgatgtttttgaccggaatgaaaaagtttaaaatgaacaaaaaaatgatttttggacaaattgaagtgtattgggtgcgttagtggcaaaaaataacttcgtgattcgcgcgacgaagttttgtcaattaatgccaacattggcaaatattggcagacgtaggtgcgatgttttttaccggaatgaaaaagttgaaaaagcaccaaaacatgattattggacatgttggggtgtattgggcgtgttcgtggcaaaatatcacttcgagatttgcgtggcgaacttttgtcagttaatgccaatattggcagacgtgcgtgcgatgtttttgaccggaatgaaaaagtgcgaaaagcaccaaaacatgatttttggacatattggagtgtattgggtgcgtcgtggagaaaatcacttcgtgattcgcgcagcgaacttttctcaattaatgccaatattggcaaatattgttagacgtgggtgctatgtttttgaccggaatgaaaaagttcaaaaagcaccaagacatgatttttggacatattggagtgtattgggtgtgttcgtggaaaaaaattatttcgtgatttgcgcagcgaaattttgtaaattaatgccaatattggcatatattggcagacatgggtgcaatgtttttgaccggaatgaaaaagttcaaaaagcaccaacatatgatttttggacatattggagtgtattgggtgcgttcgtgacaaaaaatcacttcgagattcgcgcggcgaacttttgtcaattaatgccaaaattggcagacgtgggtgcgatgtttttaaccagaatgtaaaagttcaaaaagcaccaaaacataatttttggacatattggagtgtattggtgcgttcgtggcaaaaaatcactccgtgttttgcgcggcgaacttttgtcaattaatgccaataatggcacacatagctgtgttgttttttaccgaaattaaaaagttcacaaagcaccaaaacatgatttttgtacatattggagtgtattggatgcgttcgtggaaaaaacacacttcgtgattcgcgcggcgaacttttgttaattaatgccaatattggtacacgtgggtgcgatgtttttgaccggaatgaaaaagttcaaaaagcaccaaaacatgatttttggacatgttggagtgaattgggttcgttcgtggcaaaaaatcacttcgtgcttatcgcggcgaacttttgtcaattaatgccaatatttgcaaatattggcaaacgtgggtgcgatgtttttgactggaatgaaaaagttcaaaaagcaccaaaacatgatttttggacatattggagtgtattgggtgcgttcgtggcaaaaaatcacttcgtgattcgtgcggcgcagttttgtcaattaatgccaatattggcaaatattggcagacgtgggtgcgatgcttttgaccggaatgaaaaacatcaaaaagcaccaaaacatgatttttggacatattagagtgtattgggtgcgttcgtggcaaaaaatcacttcgtgattcgcgcggcgaacttttgtcaattaataatgccaatattggcacacgtgggtgcgatgtttttcaccggaatgaaaaagttcaaaatgaaaaaaaaaaatgatttttggacatattggagtgtattgggtgcgttcgtggcaaaaaataacttcgtgattcgcgcgacgaagttttgtcaattaatgccaacattggcaaatattggcagacgtaggtgcgatgttttttaccggaatgaaaaagttgaaaaagcaccaaaccatgattattggacatgttggagcgtattgggtgtgttcgtggcaaaatatcacttcgtgattcgcgtggcgaacttttgtcaattaatgccgatattggcaaacgtgcgtgcgatgtttttgaccggaatgaaaaagttcgaaaagcaccaaaacatgatttttggacatattggagtgtattgggtgcgtcgtggaaaaaaatcacttcgtgattcgcgcggcgaggttttgtcaatgaatgccaatattagcatatattggcacacgtgggtgcgatgttttttgtcaaaatgaaaaagttcaaaaagcaccaaaacatgatttttggacatatttgagtgtattggtgcgttcgtggaaaaaacacactccgtgattcgcgcggcgaacttttgtcaattaatgccaatattggtacacgtgggtgcgatgtttttcaccggaatgaaaaagttcaaaaagcaccaaaacataatttttggacatgttggtgtgtattgggttcgttcgtggcaaaaaatcacttcatgattcgcgcggcgaacttttgtcaattaatgccaatattggcacacgtgggtgcgatgtttttgaccggaatgaaaaggttgaagaatcaccaaaaaatgatttttggacatattgaagtgtattgggtgcgttcatggcgaaaaatgacttcgtgcttcgcgcggcgaacttttgtcaattaatgccaatattgagacacgtgggtgcgatgtttttgaccggaatggaaaagttaaaaaagcaccaaaacattatttttggacatattggggtgtatttggtgagttcgtggcaaaaaatcacttcgtgcttcgggcggcgaacttttgtcaattaatgccaatattgacacacgtgggtccaatatttttcaccggaatgaaaaaagttcaaaaagcaccaaaacatgacttttagatatattggagtgtattgagtgcgttcgtggtaaaaaatcacttcgtgattcgcacgacgaggatttgttaattaatgccaatattggcatacgtgggtgcgatgtttttgatagaaatgaaaaaagttgaaaaagcaccaaaacattatttttggacatattggagtgtattgggtgcgttcgtggcaaaaaatcacatcgtgattcgcgcggcgaacttttgtcaattaatgccaatattggcacacgtgggtccaatgtttttcaccggaatgaaaaaagttcaaaaagcaccaaaacttgacttttggacatattggagtgtattgggtgcgttcgtggcaaaaaattacttcgtgcttcgcgtggcgaacttttgtcaattaatggcaatattggcacatgtgggtgcgatgtttttgaccggaatgaaaaagttcaaaaggcaccaaaacattatttttggacaaattggagtgtatttggtgtgttcatggcaaaaaatcacttcatgattcgcgcggcgaacttttgtcaattaatgctaatattagcagacgtgggtgcgatgtatttcaccggaatgaaaaatttcaaaaagcaccaagacatgacttttgaacatattggagtgtattgggtgcgttcgtggaaaaaaaatcacttcgtgattcgcgcagcgaacttttgtcaattaatgccactgttggcatatattggcagacgtgggtgcgatgtttttgaccggaatgtaaaatttcaaaaagcaccaacacatgatttttggacatattggagtgtattgggtgcgttcgtggcaaaaaatcacttcgtgattcgcgcggtgaactttggtcaattaatgccaatattggcacacgtgggtgcgaattttttgaccggaatgaaaaagttcaaaaagaaccaaaaaatgatttttggatatattggagtgtattgggtgcgttcgtggcaaaaatgatgagggagttaggtcccgatcttccgataggtgttgataaacagtcgatttgggcggagtcacgacacaactcgatccggcttttgaacgaacacgctactgagcctcgcaatcgcagcaccatgtctcctctggttattgtaacaccctgaaaatttttgtccttatttgcgaaatcaaaatttcgtgttaatcaaaaatcttttccaaaatccgtcgtgctggcttttattggactttatctcccatttttcggttacgcttggaccacgaggatggaaatctagggacaaaatttattttacattctgatattatttgataaaagaaccatgattatgaaatatatactaattaagaaaatgtttgcaaataccatttgtctttccgaaaaccctttctatgaattagaaacctatttgaggtatttgttttataaatgaaacaaatactaaatatttagaaaacatactttgagagatatttccctgagaaaactatctttacaaatgagggctaatattagttaacttttggaaaccctattttgaaattataagtgtttgggaattattttacaaataaagactagagggaatttactagcaaaactgtatttacaaactaaaatcttaaaagagtttatttgaaaagaattcaggaaaaagtctagttttcctccttgaaaggcctagccgacctacataatgggatttgtgttgtttgtgtgcatttatttgtttgtgccaaagatctcggttaatccatccttgtgaatcccaatccatgttgtatttcccccggaatcaaactctgtagttcgatcctccttctcaatcggatcctcccgaaccgattgttctagcgtctagaattactcaaactcagtagtttttccggaatctcctctcagggtaatatccatcatcggttccctctcaatcctcctataccattgcaatacaacatcctttccttgaatcgttggaataccgcgattaaatcgatccacctaaaggatgttctccaatcgacatccttccttgtcatctttcctctccgactgatttgtcaagcgtttcggtgaagctaatcgaagccccgaaagcctttcctttgtcataacatcttttttcctcagaccgattgaacactggagttgaacctgagccatctcgtctattcgactcggctctccccgaattcctttcttccctatccctcttgctcgaaattaccgagtttggccactcgctcagaaccctaaaattgttcggcgaattgatttgtcatatgcaagttcaactatcctccattctatctcgacccgtgaaaccctaccgcgccaaatggatttgtgcgccatgcgccgctcctgaactcctcgtcgatattgccctacctttggaaccctatcgcgtccaatggatttgtatgccaagcgtcgcttctaaaactccccggcattgttgtcgttcgttcgctcgatcgctcgcaaagaaatcctaaatcaagtatttgggcaactaagcggccaaaacaattccaatccaaaccccagccactagtgacaatccagagccaaatcaaatgtccaattatatagtcctattacaaattctcagtccagttaccaatatacagttcatctacaaattccaaatacaaaattcttcccaattccaatccttacaaatacagagagtccccattctgttgggccttcttttccagccagcccaactcaccccccagcacaagtatgtctttgctccctcaccagctctccctctctcttgcagccaagtctactccccctccttccttgcctcagccagcaggctgacacgccgcccgccacgtgctcggcaaaatgccgagtcgggcgaggctggcgcaccgggtcaccgagccaccgtgccgtgccgcgccgctcctccttgcgtgcgccgcaccgcgctcctgcaccgagccgcaccgcaccgcgctcagtgccgcgccgtgcactgaccgtgcccctaccaacccagccgtgggtggatgacggccttcaagccgagggccccgcacgacggcctccctcctgcaccgtgctcttagcccaccaagcacctcccaaatctcttccccaaacaccaagaacacagtgtgagtggttcacaccgaacgagaaaactgagtccacaccgaattggagagctagttcacagcgaagcttatcttgtaagcctccttcctgtagcgatgtcgacactcggggcccacattatcgccgtccatcccatccgccgccgacacgtgcttcggggaagccttgtgaccgatggtcacttcgccgcctcccaggacgtcgcccgcgtgagcgtcgctactcctcgtccacgccttgcatcctcgctctccatcggccgcagacgagcgtccgcgtgagctgcgttcacgccgccagcctcgcacctcccctccactgtgtcgatgacgacacccgggcccgcgccgccgccgtccaacctatggacgcgcgccacatcacccttccaccactgtgtcgatccttctcctagaagccatccgcaaccaagcaaaaccgtggccatgcccgctatcccccaccattcgccccctccaatcatcgccacctctgctcctctcctgggccaacacccaccgccgccactgcctcggcgccgcccttcggagcagctcgtcggcttcacctcctcgccccgtctcggccgccaccacgcacggccagatcggccccgcgcgagtgccatccccgcgcccggccaagccgaacgcacgagtgccaccttcgagcgcgggcgccacctccaaccccgttgccgaagttgtcgccgtcgccgtcttcaccggcacggggacgccgccgcgccgtgtggagcgccgcctcctcgcgtggccacctccacgcgcgccgcctctgcgaccatccagcggctagcacctccacctccgcctcctctggtcggcgccgccccgatctcctcctcgccgcgccgaccatcttccccgtccaaccggcgccgccccgacgacctccgccgtcgccgcacaggccattccccatccgccgtcacctcaggccgcgccatcgcgatcggtcaacggccaggccgcggcgccaagcgccgagcgccgccgtgtggagcgccgcctcctcgcgtggccgcctccacgcgcgccgcctctgcgaccatccagcggccagcacctccacctccgcctcctctggtcggcgccgccccgatctcctcctcgccgcgccgaccatcttccccgtccaaccggcgccgccccgacgacctccgtcgtcgccgcacaggccattccccatccgccgtcacctcaggccgcgccatcgcgatcggtcaccggccaggccgcggcgccaagcgccgagcgccgccgtgtcgcctcctgccgcgccgctggtgccccggccctcttccttccccgacgccgccgggccatctccaggctgccgtcgcacgggccggcacccagtcaccgcgccgtcgccgaccctcgccccggcctccctttccccaccggcgccgctccctttctcctttctccttcccccaccgccgcccagcaccaggcccccgtcgccggcactcctcttctctcgggcacgcgtgaggaaaccgaggcagagaaggaatcgagagagagatgcgaggagaagaaagcgagaaacagatcaggttaagagagagaggaaataaaaggaaaggaaaagaaagggacagtgggacccactagggctccaccatcttgactcctctctctgacctcctttgacctggaaactaccaaaaagtctagcttgcatacctctgtcttcctcgggacagagcccactttcagcccctttatccaccaaagtccatattacatctctccagaacccaagttcctctctgaaagtctgtattttctccctcctccaaacttcgggcagtagcccatcagtagtcttcatctccacccaagtccaatatatctcctccaatctagaggatcaccttgggtttatttcttccgaaaataaaaggaatcctattttgggtatccttttcctcgatttataaatcatctaatcttcgagaattcatatcttgcaaaccgtgactccgattgattccattcaacttccgaaactcttctaaaatcgagatctatccaatgacactgctggtttgaattgattggtactttatttggaggttgttatatggttttctcgtgctaaccacgtatcgagtattccggatattcgtcgatcgtggatttctcgaagataccgatttctaaaagcaaggcaagtcactacgctcccctccttgagcatattgaacccagtttataaatgttttgtttataaataaagttgcatgctaattataaaatggcgtgcctaaattgtatgtgaaccatccttgatattgttacctttatatatccttgttgcctgagtctattatttatgcgtggtcaattattgacattacttagtactgcttataattatagacgattgtacactccataataattgggtatggatgtgttggtagcggtcactcatcgagagtgattgccagaaggcgggtggagacatgagcgccacccgcagcaaaaacctttgcgaaaaccaaaaacctaattaaacaaaatgttttcgactggggcggcatggatagaatatgggtggttctagaaacggctagtcgccgaccctggtcaattaaggaccgagtcaagaagctatacagaaaacgattagagtacgaccgcacttcttgagtgggtatagacccggtggactaagtaaattctcatggggcggcacccctgtcatggtggttccgaagtggtgacgtgatggaggtgaaggatcgagtggatcgatcgtttggatgccgcggcaaaacttaaaacacacctaatctatatgtaatataacccattgtgatcccgggagcgccagaactctcctcactactggctcgaggtggttgttgtgccgggagtgtaatggggatccatagtccttggaacgggtgccgaaacgcgagaatgactgaaaaaccgggccatggcaagtctcatgtgttgggactaggctcatgtgttgggcaagctgcggagtgcgggattaaaagcgtacatccactgcagtgtgagtaaatcaaatctatttgaatagccgtgctcgcggttattgagcgccgggacttgtactacacttgagtagccttatagattttaatcttgcttagataaggaaagtggtgtgaccttgcccgataggcgggaaggtcatgatgatgttaagaatgtgaaaaactggatgcgagggtaaaccgaaccaagcgaggcttggggaaggtggatgaaccctcacggattaatgacaacttcaacttaacattgttttcagttaaaactgctaggtcacaggtttgtgaaatgatttgtgaaacctagctttatgcaaataaaccaagccatccttgaacccttgtgtgcactaaatgcattccgtagtggtggcttgctgagtacggttggtactcacaattgcttaactaaatcttttagaaaggagttggagtcgatcatttgggaactatgctaatgaagaggtgtcaaagacggtggagtcaggacctaggttcaccagtcgatgcctgtggagtacgttggaccgccgctgcttctcttccgctatctcatctacttcttttggtattttgcaatgtacatgaccatgctcggtctatttgggtcccatttgggctaccctttattattaatgtgtacaattcaacctgtacatcgatgtcagcttgagatattcaactgtgccatgtgtgtaccatctactgatccagggaatggtattgtaagacacatggggttttcgatgtgtaaaaccgagggcccacagttataagccgtgccgaaacccggttgacctcgccgagaaggctaatccctgcatgcaaatctaagaacacaaacaagaacaagatagattgcaatcaaattgcatattaatgattaagcacacgaatttggggttctagaaaccgatctagcggcgaaactgttcttgacagaataatctaagcaaaacctgactctaaacgatgacggctactgaataaatgtgattagggacgtcctagggttgccctatggagcacacccccttgggctaagctcacgacacaattacaaggcccaaaacccaagtcaaattcggactggatgaggtacgtggtttgttttgcagatacccggcagctcggtaaaatttttgatgtgggaccaaaaccatctgaaagtagattctataagctttccaacaagtactcatgggccccgaaactccttctagatcagcggctaggtccgtttgaagttgatgctgtcaggaggcccgaatccgaatccaaaatgtgtacaacttgatctcttgtcttctatgggccaaaagtgacgtggtgaggtagacgtagacttggagaaggtcttggtttaggcaccaatcaacttctttgatcatccatgcatttattatgctcggtctcttttccttcgcccaaacaagtacctctgcaaacaaaaacacacaaaactcattgtgtagcaacatttgttcaaatatataacatgtaaatataatgtagaacatatgtacctttggttgattaatacataaggtagtcatggttatattcgaactagttgtgtcctcatcatcctccccttcttgattggaaaccgttctcggtttcaccttgacatggagcattttgaacttatctttttctatcacaacatccggtgaggaacatttcttgacagccatatggttggatcctgaaatctttttagtcgaaaaaccacaacactccctttcttgcaaaccaacttgtaactcatttaaacgactagaggaacttgatagagaattacgtatgcacatgaggtcctcaagacaatacatttcatcatgaaaaagaggtatagtcaaattcgaacaaatatatactcgatgcacattatattcttctttactatcataattgccaataatatgaaaaatcacatcaaaagggcatggcaattcaaatctagtaaataatttcttctctaaacagttgagtggataaagatcatcaaattgaatataaccccaagtatttaaagaatatagcaatttaaactcttcattcttgctagcaatgtgaataacatgtttaaactcaacacgtagtggctctactatagaactaacatcattcactagttctggcatggatataagtaaagcatcgcacaactcttctttatcacaagtgtatttgttttgtgacaaaggcatttcaacaattgttggatatattagagtgtattgggtgcgttcgtggcaaaaactcactccgtgattcgcgcgccgaacttttgtcagttaaagccaatattggcacatgagggtgcgatgtttttgaccggaatgaaaaagtttaaaaagcacccaaacatgatttttggacatattggagtgtattggttgcgttcgtggcaaaaactcacttcgtgattcgcgcggcgaacttttgtcaattaatgccaagttggccgacacgggtgcgatgcttttgaccggaatgaaaaagttcaaaaagaaacaaaacatgattttcgcacatattggagtgtattgggtgcgttcgtggcaaaaactcgcttcatgattcgctcggcgaacctttgtcaattagtgccaatattggcatattttggccgacacggatgagatgtttttgaccggaatgaaaaagttcaaaaagcaccaaaacatgatttttggatatattggagtgtaatgggtgtgttcgtggcaaaaacttacttcgtgattcacgcggcgaacttttgtcaattaatgccaatattggtcgacatgggtgcgatgtttttgaccggaatcaaaaagttcaaaaagcaccaaaacaagatttttggacatattgaatttactgggtgcgttcgtggcaaaaactcacttcgtgatacgcgcgacgaacttttgtcaattaatgccaatattggccgatatgggtgcgacgtttttgacaggaatgaaaaagttaaaaaagcagcaaaacatgatttttggacatattggagtgtattggttgggttcgtggcaaaaactcacttcgtgattcgcgcgacgaacttttgtcaattaatgccaatattggccgatatgggtgtaatgtttttgaccgcaatgaaaaatttcaaaaaacagcaaaacatgatttttggacatactggagtgtattgggtgcgttcatggcaaaaacttacttcatgattcgcgcgacgaacttttgtcaattaatgccaaaattggccggcatgggtacgatgtttttgaccggaatcaaaaagttcaaaaagcaccaaaacatgatttttggacatatttgactttattgggtgcgttcgtgacaaaaactcacttcctgattcgcgcggcgaacttttgtcaattaatgccaatattggctgacatgggtgcgatgtttttgaccggaatgaaaaagttcaaaaagcgccaaaacatgatttttagacatattggagtgtattggttgcgttcgtggcaaaaacttacttcgtgattcgcacgatgaacttttgtcaactaatgccaatattggcaaattttggcccacacggatgcgatgtttttgaccggaatgaaaaagttcaaaaagcaccgaaacatgatttttgcacatattagactttattgggtgcgttcgtggcaaaaactcacttcgtgattcgcgcggcaaatttttgtcaattaatgccaatattggccgacatgggtgcgacgtttttgaccggaatcaaaaagttcaaaaagcaccaaaacatgacttttggacatgttggagtgtattgggtgcgttcgtagcaaaaactcacttcgtgattcgcgtggcgaacttttgtcaattaacgacaatattggaaaattttagcccacacggatgcgatgtttttgaccggaatcaaaaagttgaaaaaacaccaaaacatgatttttggacattttggagtgtattgggtgcgttcgtggcaaaaactcacttcgtgattcgcgcggcgaacttttgtcaattaatgccaatattggccgacatgggtgcgatgtatttgaccggaatgaaatatttcaaaaaagcaccaaaacatgattttaggacatattggagtgtattgggtgcgttcgtggcaaaaactcacttcgtgatacacgcggcgaacttttgtcaattaatgccaatattagcccacacaggtgcgatgtttttgaccggaatgaaatagttcaaaaagcaccaaaacatgagtttaggacatattggagtgtattgggtgcgttcgtggcaaaaactcacttcgtgattcgcgcgacgaacttttgtcaattaatgccaatattggcccacacaggagagatgtttttgaccggaatgaaatacttcaaaaactcaccaaaacatgattttaggacatattagagtgtattgggtgcgttcgtggcaaaaactcacttcgtgattcacgcggcgaacttttgtcaattaatgccaatattggccgacttgggtacgacgtttatgaccggaatcaaaaagttcaaaaagcaccaaaacatgatttttggacatattggagcgtattgggtgcgttcctggcaaaaactcacttcgtgattcgcgcggcgaacttttgtcaattattgacaatataggccgacatgggtacgatgtttttgaccagaatcaaaaagtccaaaaagcaccaaaacatgatttttggacatattagactttattgggtgcgttcgtggtaaaaactcacttcgtgaatcgcgcggcgaactattgtcaactaacgccaatattggcaattttggaccacacggatacgatgtttttgaccggaatgaaaaagttgaaaaagcaccaaaacatgatttttggacatattggactttattgggtgcgttcgtggtaaaaactcacttcgtgattcgcgcgacgaacttttgtgaattaatgccaatattggccgacatgggtgcaatgtttttgaccggaatgaaaattttcaaaaagcagcaaaacatgatttttggacatattggagtgtattgggtgcgttccaggcaaaaactcacttcgtgattcgcgcggcgaacttttgtcaattattgacaatataggccgacatgggtacgatgtttttgaccagaatcaaaaagtccaaaaagcaccaaaacatgatttttggacatattagactttattgggtgcgttcgtggcaaaaactcacttcgtgattcgcgcgacgaacatgggtgcaatgtttttgaccggaatgaaatacttcaaaaaagcaccaaaacatgattttaggacatattggagtgtaatgggtgcgttcgtggcaaaagctcacttcgtgattcgcgcggcgaacttttgtcaattaatgccaattttagcccatacgggtgcgatgtttttgaccggaatgaaaaagttcaaaaagcaccaaaacaagatttttggacatattggagtgtattgggtgcgttcgtggcaaatactcacttcgtgattcgcgcgacgaacatgggtgcaatgtttttgaccggaatgaaaattttcaaaaagcagcaaaacatgagttttggacatattggagtgtgttgggtgcgttcctggcaaaaactcacttcgtgattcgcgcggcgaacttttgtcaattattgccaatataggccgacatgggtacgatgtttttgaccagaatcaaaaagtctaaaaagcaccaaaacatgatttttggacatattagactttattgggtgcgttcgtggcaaaaactcacttcgtgattcgcgcggcgaacttttgtcaattattgacaatataggccgacatgggtacgatgtttttgaccggaatcaaaaagtccaaaaagcaccaaaacatgatttttggacatattagactttattgggtgcgttcgtggcaaaaactcacttcgtgattcgcgcggcgaacttttgtcaactaacgccaatattgtcaattttggaccacacggatgcgatgtttttgaccggaatgaaaaagttgaaaaagcaccaaaacaagatttttggacatattggactgtattgggtgcgttcgtggcaaaaactcacttcgtgatttgcgcgacgaacttttgtcaattaatgccaatattggccgacatgggtgcgatgtttttgaccggaataaaaaagtttaaaaagtagcaaaacatgattttcggacatattagagtgtattggttgcgttcgtggcaaaatctcacttcgtgattcgcgcggcgaacttttgtcaattaatgccaatattggccgacatgggtgcgatgtatttgaccggaatgaattacttcaaaaaggcaccaaaacatgattttaggacattttggagtgtattgggtgcgttcgtggcaaaaactcacttcgtgattcgcgcggcgaacttttgtcaattaatgccaatattggcccacacgggtgtgatgtttttgaccggaataaaatacatcaaaaaagcaccaaaacatgatttttggacatatcggagtgtattgggtgcgttcgtggcaaaaactcacgcgtgattcgcgtggtgaaaatttgtcaattattgccaatattggccgacacgggtgcgatgtttttgacaggaatgaaatacttcaaatagcaccaaaacatgatttttggacatattggagtgtattgggtgcgttcgtggcaaaaactcacttcgtgatacacgcggcgaacttttgtcaattaatgccaatattagcccacacaggtgcgatgtttttgaccggaatgaaatagttcaaaaagtaccaaaacatgattttaggacatattggagtgtattgggtgcattcgtggcaaaaactcacttcgtgattcgtgtggcgatcctttgtcaattattgcagatattggccgacacaggtgcgatgtttttgaccggaatgaaatagttcaaaaaagcaccaaaacatgattttaggacatattggagtgtattgggtgcgttcgtggcaaaaactcacttcgtgattcgcgcgacgaacatgggtgcaatgtttttgaccggaatgaaaattttcaaaaagcagcaaaacatgagttttggacatattggagtgtgttgggtgtgttcctggcaaaaactcacttcgtgattcgcgcggcgaacttttgtcaattattgccaatataggccgacatgggtacgatgtttttgaccagaatcaaaaagtctaaaaagcaccaaaacatgatttttggacatattagactttattgggtgcgttcgtggcaaaaactcacttcgtgattcgcgcggcgaacttttgtcaattattgcagatattggccgacacgggtgcgatgtttttgaccggaatgaaatagttcaaaaagcaccaaaacatgatttttggacatattggagtgtattgggtgcgttcgtggcaaaaactaacttcgtgattcgcgcggcgaacctttctcaattaatgccagtattggccgacaagagtgcgatgtttttgaccggaatgaaatacttcaaaaaagcaccaaaacatgattttaggacatattggactgtattgggtgcgttcgtggcaaaaactcacttcgtgattcgcgcgacgaacttttgtcaattaatgccaatattggccaacatgggtgcgatgtttttgaccggaatgaaaattttcaaaaagcagcaaaatatgatttttggacatattggagtgtattgggtgcgttcctggcaaaaactcacttcgtgattcgcgcggcgaacttttgtcatttattgacaatataggccgacatgggtacgatgtttttgaccggaatcaaaaagtccaaaaagcaccaaaacatgatttttggacatattagactttattgggtgcgttcgttgcaaaaactcacttcgtgattcgcgcggcgaacttttgtcaattattgcagatattggccgacacgggtgcgatgtttttgaccggaatgaaatagttcaaaaagcaccaaaacatgatttttggacatattggagtgtattgggtgcgttcgtggcaaaaactcacttcgtgattcgcgcggcgaacctttctcaattaatgccagtattggccgacaagagtgcgatgtttttgaccggaatgaaatacttcaaaaaagcaccaaaacatgattttaggacatattggagtgtattgggtgcgttcgtggcaaaaactcacttcgtgattcgcgcgacgaacttttgtcaattaatgccaatattggccaacatgggtgcgatgtttttgaccggaatgaaaattttcaaaaagcagcaaaatatgatttttggacatattggagtgtattgggtgcgttcctggcaaaaactcacttcgtgattcgcgcggcgaacttttgtcatttattgacaatataggccgacatgggtacgatgtttttgaccggaatcaaaaagtccaaaaagcaccaaaacatgatttttggacatattagactttattgggtgcgttcgttgcaaaaactcacttcgtgattcgcgcggcaaacttttgtcaactaacgccaatattgtcaattttggaccacacggatgcgatgtttttgaccggaatgaaaaagttgaaaaagcaccaaaacaagatttttggacatattggactgtattgggtgcgttcgtggcaaaaactcacttcgtgattcgcgcggcgaacttttgtcaattaatgccaatattggccgacatgggtgcgatgtatttgaccggaatgaattacttcaaaaaggcaccaaaacatgattttaggacattttggagtgtattgggtgcgttcgtggcaaaaactcacttcgtgattcgcgcggcgaacttttgtcaattaatgccaatattggcccacactggtgttaagtttttgaccggaataaaatacatcaaaaaagcaccaaaacatgatttttggacatatcggagtgtattgggtgcgttcgtggcaaaaactcacgtcgtgattcgcgtggcgaaaatttgtcaattattgccaatattggcccaaacgggtgcgatgttttttaccggaatgaaaaagttcaaaaagcaccaaaacatgattttaggacatattggagtgtattgggtgcgttcgtggcaaaaacttacttcgtgattcgcgcggcgaacctttctcaataaatgccaatattggtcgacacgggtgcgatgtttttgaccgggatgaaatacttcaaaaagcaccaaaacatgatttttggacatattggagtgtattgggtgcgttcgtggcaaaaactcgcttcgtgattcgcgcgacgaaattttgtcaattaatgccaatattggccgacacgggtgcgatatttttgaccggaatgaaatacttcaaaaagcaccaaaacatgatttttggacatattggagtgtattgggtgcgttcgtggcaaaaactcacttcgtgattcgcgcggcgaacctttctcaattaatgccaatattggccgacacgggtgcgatgtttttgaccggaatgaaatacttcaaaaagcaccaaaacatgatttttggacatattggagtgtattgggtgcgttcgtggcaaaaactcgcttcgtgattcgcgcgacgaaattttgtcaattaatgccaatattggccgacacgggtgcgatatttttcaccggaatgaaatagttcaaaaagcaccaaaacatgatttttggacaaattggagtgtattgggtgcgttcgtggcaaaaactcacttcgtgattcgcgcggcgaaatgttgtcaattaatgccaatattggcccacacgggtgcgatgttttttaccggaatgaaaaagttcaaaaagaaccaaaacatgattttaggacatattggagtgtattgggtgcgttcgtggcaaaaactcacttcgtgattcgcgcggcgaaccgttctcaataaatgccaatattggtcgacacgggtgcgatgtatttgaccggaatgaaatacttcaaaaaagcaccaaaatcatgatttttagacatattggagtgtattgggtgcgttcgtggcaaaaactgacttcgtgatacacgcggcgaacttttgtcaagtaatgccaatattggacgacacgggtgcgattttcttttgaccggaatgaaatacttcaaaaaagcaccaaaacatgagtttaggacatattggagtgtattgggtgcgttcgtggcaaaaactcacttcgtgattcgcgcgacgaacttttgtcaattaatgccaatattggcccacacgggagcgatgtttttgaccggaatgaaatagttaaaaaactcaccaaaacatgagtttaggacatattggagtgtattgggtgcgttcgtgacaaaaactcacttcgtgattcgcgcgacgaacttttgtcaattaatgccaatattggcccacacaggagcgatgtttttgaccggaatgaaatacttcaaaaactcaccaaaacatgattttcggacatattggattgtattgggtgcgttcgtggcaaaaactcacttcgtgattcacgcggcgaacttttgtcaattaatgccaatattggccgacatgggtgcgatgtttttgaccggaataaaaaagtttaaaaagtagcaaaacatgattttcggacatattagagtgtattggttgcgttcgtggcaaaatctcacttcgtgattcgcgcggcgaacttttgtcaattaatgccaatattggccgacatgggtgcgatgtatttgaccggaatgaattacttcaaaaaggcaccaaaacatgattttaggacattttggagtgtattgggtgcgttcgtggcaaaaactcacttcgtgattcgcgcggcgaacttttgacaattaatgccaatattggcccacacgggtgtgatgtttttgaccggaataaaatacatcaaaaaagcaccaaaacatgatttttggacatatcggagtgtattgggtgcgttcgtcgcaaaaactcacgcgtgatttgcgtggtgaaaatttgtcaattattgccaatattggccgacacgggtgcgatgtttttgaccggaatgaaatacttcaaatagcaccaaaacatgatttttggacatattggagtgtattgggtgcgttcgtggcaaaaactcaattcgtgatacacgcggcgaacttttgtcaattaatgccaatattagcccacacaggtgcgatgtttttgaccggaaagaaatagttcaaaaagcaccaaaacatgattttaggacatattggagtgtattgggtccattcgtggtaaaaactcatgtcgcgattcgcgcggcgaacctttattaattattgccaatattggccgacgcgggtgcgatgtttttgtccggaataaaatagttcaaaaagaaccaaaacatgattttaggacatattggagtgtattgggtgcgttcgtggtaaaaactcacttcgtgattcgcgcgacgaacttttgtcaattaatgccaatgttgtcccacacaggagcgatgtttttgaccggaatgaaatagttcaaaaactcaccaaaacatgagtttaggacatattggagtgtattgggtgcgttcgtgacaaaaactcacttcgtgattcgcgcgacgaacttttgtcaactaatgccaatattggcccacacaggagcgatgtttttgaccggaatgaaatacttcaaaaactcaacaaaacatgattttaggacatattggagtgtattgggtgcgttcgtggcaaaaactcacttcgtgattcacgcggcgaacttttgtcaattaatgccaatattggcccacacgggtgcgatgtttttgaccggaataaaaaagtttaaaaagtagcaaaacatgattttcggacatattagagtgtattggttgcgttcgtggcaaaaactcacttcgtgattcgcgcggcgaacttttgtcaattaatgccaatattggccgacatgggtgcgatgtatttgaccggattgaaaaagttcaaaaatcaccaaaacatgatttttggacatattggagtgtattgggtgcgttcgtggcaaaaagtcacctcgtgattcgcgcggcgaacttttgtcaattaatgccaatattggcatatttttgcccaaacaggtgcgatgtttttgaccggaatgaaaatgttcaaaaatcaccaaaacatgatttttggacatattggagtgtattgggtccgttcgtggcaaaaactcgcttcatgattcgctcggcgaacttttgtcaattaatgccaatattggcatatttttccccaaacgggtgcgatgtttttgaccggaatgaaaatgttccaaaatcaccaaaacatgatttttggacatattggagtgtattgggtgcgttcgtggcaaaaactcgcttcttgattcgctcggcgaacttttgtcaattaatgccaatattggcatatttttgcccaaacgggtgcgatgattttgaccggaatgaaaatgttcaaaaatcaccaaaacatgatttttggacatattggagtgtattgggtgcgttcgtggcaaaaactcgcttcatgattcgctcgacgaacttttgtcaattaatgccaatattggccgacacgggtgcgatgtttttgaccggaatgaaatagttcaaaaagcaccaaaacatgattttatgacatattggattgtattgggtgcgttcgtggcaaaaactcacttcgtgatacacgcggcgaacttttgtcaatcaatgcaaatattggccgacacgggtgcgatgtttttgaccggaatgaaaaagttgaaaaagcaccaaaacatgatttttggacatattagactttattgggtgcgttcgtggcaaaaactcacttcgtgattcgcgcgacgaacttttgtcaattaatgccaatattggccaacatgggtgcgatgtttttgaccggaatgaaaagtttcaaaaagcagcaaaatataatttttggacaaattggagtgtattgggtgcgttcctagcaaaaactcacttcgtaattcgcgcggagtactgttgtcaattattgccaatataggccgacatgggtacgatgtttttgaccataatcaaaaagtccaaaaagcaccaaaacatgatttttggacatattagactttattgggtgcgttcgtggtaaaaactcacttcgtgattcgcgcggcgaacttttgtcaactaacgccaatattggcaattttggaccacacggatgcgatgtttttgaccggaatgaaaaagttgaaaaagcaccaaaacatgatttttggacatattagactttattgggtgcgttcgtggcaaaaactcacttcgtgattcgcgcggtgaacttttgtcaattaatgccaatataggccaacatgggtgcgatgtttttgaccggaatgaaaattttcaaaaagcaggaaaatatgatttttggacaaattggagtgtattgggtgcgttcctagcaaaaactcacttcgtaattcgcgcggagtactgttgtcaattattgccaatataggccgacatgggtacgatgtttttgaccggaatcaaaaagtccaaaaagcaccaaaacatgatttttggacatattagactttattgggtgcgttcgtggcaaaaactcacttcgtgattcgcgcggcgaacttttgtcaactaacgccaatattggcaattttggaccacacggatgcgatgtttttgaccggaatgaaaaagttgaaaaagcaccaaaacatgatttttggacatattggactttattgggtgcgttcgtggcaaaaactcacttcgtgattcgcgcgacgaacttttgtcaattaatgccaatattggccgacatgggtgcgatgtttttgaccggaatgaaaattttcaaaaagcagcaaaacatgatttttggacaaattggagtgtattgggtgcgttcctagcaaaaactcacttcgtaattcgcgcggagtactgttgtcaattattgccaatataggccgacatgggtacgatgtttttgaccggaatcaaaaagtccaaaaagcaccaaaacatgatttttggacatattagactttattgggtgcgttcgtggcaaaaactcacttcgtgattcgcgcggcgaacttttgtcaactaacgccaatattggcaattttggaccacacggatgcgatgtttttgaccggaatgaaaaagttgaaaaagcaccaaaacatgatttttggacatattggactttattgggtgcgttcgtggcaaaaactcacttcgtgattcgcgcgacgaacttttgtcaattaatgccaatattggccgacatgggtgcgatgtttttgaccggaatgaaaattttcaaaaagcagcaaaacatgatttttggacaaattggagtgtattgggtgcgttcctagcaaaaactcacttcgtaattcgcgcggagtactgttgtcaattattgccaatataggccgacatgggtacgatgtttttgaccggaatcaaaaagtccaaaaagcaccaaaacatgatttttggacatattagactttattgggtgcgttcgtggcaaaaactcacttcgtgattcgcgcggtgaacttttgtcaattaatgccaatattggccaacatgggtgcgatgtttttgaccggaatgaaaattttcaaaaagcagcaaaatatgatttttggacatattggagtgtattgggtgcgttcctggcaaaaactcacttcgtgattcacgcggcgaacttttgtcaattattgacaatataggccgacatgggtacgatgtttttgaccagaatcaaaaagtccaaaaagcaccaaaacatgattttttgacatattagactttattgggtgcgttcgtggtaaaaactcacttcgtgattcgcgcggcgaacttttgtcaactaacgccaatattggcaattttggaccacacggatgcgatgtttttgaccggaatgaaaaagttgaaaaagcaccaaaacatgatttttggacatattggactttattgggtgcgttcgtggcaaaaactcacttcgtgattcgcgcggcgaaattttgtcaattaatgccaatattggccgacatgggtgcgatgttttttaccggaatgaaaaagttcaaaaagcagcaaaacatgatttttggacatattggagtgtattcggtgcgttcgtagcaaaaactcactacgtgattcgcgcggcgaacttttgtcaattattgacaatattggccgacatgggtgcgatgtttttgaccggaatgaaaattttcaaaaagcagcaaaacatgatttttggacaaattggagtgtattgggtgcgttcgtggcaaaaactcacttcgtgattcgcgcggcgaacttttgtcaactaacgccaatattggcaattttggaccacacggatgcgatgtttttgaccggaatgaaaaagttgaaaaagcaccaaaacattatttttggacatattggactttattgggtgcgttcgtggcaaaaactcacttcgtgattcgcgcgacgaacttttgtcaattaatgccaatattggccgacatgggtgcgatgtttttgaccggaatgaaaattttcaaaaagcagcaaaatatgatttttggacatattggagtgtattgggtgcgttcctggcaaaaactcacttcgtgattcgcgcggcgaacttttgtcaattattgacaatataggccgacatgggtacgatgtttttgaccagaatcaaaaagtccaaaaagcaccaaaacatgatttttggacatattagactttattgggtgcgttcgtggtaaaaactcacttcgtgattcgcgcggcgaacttttgtcaactaacgccaatattggcaattttggaccacacggatgcgatgtttttgaccggaatgaaaaagttgaaaaagcaccaaaacatgatttttggacatattggagtgtattgggtgcgttcgtggcaaaaattcacttcgtgattcgcgtgacgaacttttgtcaactaacgccaatattggcaattttggcccacacgggtgcgatgtttttttaccggaatgaaaaagttcaaaaagcacaaaaacatgatatttagacatatcggagtgtgttgggtgcgttcgtggcaaaaactcaatttgtgtttcacgcgacgaacttttgtcaattaatgccaatattggccgacatgggtgcgatgtttttgaccggaataaaaaagttcaaaaagcagcaaaacatgattttcggacatattggagtgtattggttgcgttcgtggcaaaatctcacttcgtgattcgcgcggcgaacttttgtcaattaatgccaatattggccaacatgggtgcgatgtttttgaccggaatgaaaattttcaaaaaccagcaaaatatgatttttggacatattggagtgtattgggtgcgttcctagcaaaaactcatttcgtaattcgcgcggagtactgttgtcaattattgccaatataggccgacatgggtacgatgtttttgaccggaatcaaaaagtctaaaaagcaccaaaacatgatttttggacatattagactttattgggtgcgttcgtggcaaaaactcacttcgtgattcgcgcggcgaacttttgtcaactaacgccaatattggcaattttggaccacacggatgcgatgtttttgaccggaatgaaaaagttgaaaaagcaccaaaacattatttttggacatattggactttattgggtgcgttcgtggcaaaaactcacttcgtgattcgcgcgacgaacttttatcaattaatgccaatattggccgacatgggtgcgatgtttttgaccggaatgaaaattttcaaaaagcagcaaaatatgatttttggacatattggagtgtattgggtgcgttcctggcaaaaactcacttcgtgattcgcgcggcgaacttttgtcaattattgacaatataggccgacatgggtacgatgtttttgaccagaatcaaaaagtccaaaaagcaccaaaacatgatttttggacatattagactttattgggtgcgttcgtggtaaaaactcacttcgtgattcgcgcggcgaacttctgtcaactaacgccaatattggcaattttggaccacacggatgcgatgtttttgaccggaatgaaaaagttgaaaaagcaccaaaacatgatttttggacatattggagtgttctgggtgcgttcgtggcaaaaattcacttcttgattcgcgtgacgaacttttgtcaactaacgccaatattggcaattttggcccacgcgggtgcgatgtttttttaccggaatgaaaaagttcaaaaagcacaaaaacatgatatttagacatatcggagtgtgttgggtgcgttcgtggcaaaaactcaatttgtgtttcgcgcgacgaacttttgtcaattaatgccaatattggccgacatggatgcgatgtttttgaccggaataaaaaagttcaaaaagcagcaaaacatgattttcggacatattggagtgtattggttgcgttcgtggcaaaatctcacttcgtgattcgcgcggcgaacttttgtcaattaatgccaatattggccgacatgggtgcgatgtctttgaccggaatgaaatacttcaaaaaagcaccaaaacatgattttaggacatattggagtgtattgggtgcgttcgtggcaaaaactcacgtcgtgattcgcgcggcgaacctttgtcaattattgccaatattggccgacacgggtgcgatgtttttgaccggaatgaaatagttcaaaaagcaccaaaacatgatttttggacatattggagtgtattggttgcgttcgtggcaaaaactcacttcgtgattcacgcgatgaacttttgtcaattaatgccaatattggcccacacaggagcgatgtttttgaccggaatgaaatagttcaaaaactcaccaaaacatgattttaggacatattggagtgtattgggtgcgttcgtggcaaaaactcacttcgtgattcgcgcgacgaacttttgtcaattaatgccaatattggcccacacaggagcgatgtttttggccggaatgaaatagttcaaaaactcaccaaaacatgattttaggacatattggagtgtattggttgcgttcgtggcaaaatctcacttcgtgattcgcgcggcgaacttttgtcaattaatgccaatattggccgacatgggtgcgatgtatttgaccggaatgaaataattcaaaaaagcaccaaaacatgattttaggacatattggagtgtattgggtgcgttcgtggcaaaaactcacgtcgtgattcgcgcggcgaacctttgtcaattattgccaatattggccgacacgggtgcgatgtttttgaccggaatgaaatagttcaaaaagcaccaaaacatgatttttggacatattggagtgtattgggtgcgttcgtggcaaaaactcacttcgtgattcgcgcggcgaacctttctcaattaatgccaatattggccgacacgggtgcgatgtttttgaccgcaatgaaatagttcaaaaagcaccaaaacatgattttaggacatattggagtgtattgggtgcgttcgtggcaaaaactcacttcgtgagtcgtgtggcgaacctttgtcaattattgcagatattggccgacacgggtgcgatgtttttgaccggaatgaaatagttcaaaaaagcaccaaaacatgattttaggacatattggagtgtattgggtgcgttcgtggcaaaaactcacttcgtgattcgcgcggcgaacctttgtcaattattgccaatataggccgacatgggtacgatgtttttgaccggaatcaaaaagtccaaaaagcaccaaaacatgatttttggacatattggagttattgggtgcgttcgtggcaaaaactcacttcgtgattcgcgcggcgaacttttctcaattaatgccaatattggccgacacgggtgcgatgtttttgaccggaatgaaatacttcaaaaaggcacaaaaacatgattttaggacatattggagtgtattgggtgcgttcgtggcaaaaactcacttcgtgattcgcgcggtgaacctttctcaattaatgccaatattggtcgacacgggtgcgatgtatttgaccggaatgaaatacttcaaaaaagcaccaaaacatgatttttagacatattggagtgtattgggtgcgttcgtggcaaaaactgacttcacgatacacgcggcgaacttttgtcaagtaatgccaatattggccgacactggtgcgattttcttttgaccggaatgaaatacttcaaaaaagcaccaaaacatgattttaggacatattggagtgtattgggtgcgttcgtggcaaaaactcacttcgtaattcgcgcggcgaacctttgtcaattattgccaatattggccgacacgggtgcgatgtttttgaccggaatgaaatacttcaaatagcaccaaaacatgatttttggacatattggagtgtattgggtgcgttcgttgcaaaaactcgcttcgtgattcgcgcggcgaaattttgtcaattaatgccaatattggccgacacgggtgcgatatttttgtccagaatgaaatagttcaaaaagcaccaaaacatgatttttggacaaattggagtgtattgggtgcgttcgtggcaaaaactcacttcgtgattcgcgcggcgaacttttctcaattaatccaatattggccgacacgggtgcgatgtttttgaccggaatgaaatacttcaaatagcaccaaaacatgatttttggacatattggagtgtattgggtgcgttcgtggcaaaaactcacttcgtgatacacgcgacgaacttttgtcaattaatgccaatattagccaacacaggtgcgatgtttttgaccggaatgaaatagttcaaaaagcaccaaaacatgattttatgacatattggattgtattgggtgcgttcgtggcaaaaactcacttcgtgatacacgcggcgaacttttgtcaatcaatgcaaatattggccgacacgggtgcgatgtttttgaccggaatgaaatagttcaaaaagcaccaaaacatgattttaggacatattggagtgtattgggttcgttcgtggcaaaaactcgcttcatgattcgctcggcgaacttttgtcaattaatgcaaatattggccgacacgggtgcgatgtttttgaccggaatgaaatagttcaaaaagcaccaacacatgatttttggacatattggagtgtattgggcgcgttcgtggcaaaaactcacttcgtgatacacgcggcgaacttttgtcaattaattccaatattggccaacacgggtgcgatgtttttgaccggaatgaaatagttcaaaaactcacaaaaacatgattttaggacatattggagtgtattgggtgcgttcgtggcaagaactcacttcgtgatatacgtggcgaacttttgtcaattaaagccaatattagcccacacgggtgttgtttttgaccggaatgaaatagttcaaaaagcacaaaaacatgattttaggacatattggagtgtattgggtgcgttcgtggcaaaaagtcacctcgtgattcgcgcggcgaacttttgtcaattaatgccaatattggcatatttttgcccaaacaggtgcgatgtttttgaccggaatgaaaatgttcaaaaatcaccaaaacatgatttttggacatattggagtgtattgggtccgttcgtggcaaaaactcgcttcatgattcgctcggcgaacttttgtcaattaatgccaatattggcatatttttccccaaacgggtgcgatgtttttgaccggaatgaaaatgttccaaaatcaccaaaacatgatttttggacatattggagtgtattgggtgcgttcgtggcaaaaactcgcttcttgattcgctcggcgaacttttgtcaattaatgccaatattggcatatttttgcccaaacgggtgcgatgattttgaccggaatgaaaatgttcaaaaatcaccaaaacatgatttttggacatattggagtgtattgggtgcgttcgtggcaaaaactcgcttcatgattcgctcgacgaacttttgtcaattaatgccaatattggccgacacgggtgcgatgtttttgaccggaatgaaatagttcaaaaagcaccaaaacaggattttaggacatattggagtgtattcggtgcgttcgtggcaaaaactcacttcgtgatccgcgcggcgaacttttgtcaattaatgccaatattgcccacacgggtgcgatgtttttgaccggattgaaaaagttcaaaaatcaccaaaacatgatttttggacatattggagtgtattgggtgcgttcgtggcaaaaagtcacctcgtgattcgcgcggcgaacttttgtcaattaatgccaatattggcatatttttgcccaaacaggtgcgatgtttttgaccggaatgaaaatgttcaaaaatcaccaaaacatgatttttggacatattggagtgtattgggtccgttcgtggcaaaaactcgcttcatgattcgctcggcgaacttttgtcaattaatgccaatattggcatatttttccccaaacgggtgcgatgtttttgaccggaatgaaaatgttccaaaatcaccaaaacatgatttttggacatattggagtgtattgggtgcgttcgtggcaaaaactcgcttcttgattcgctcggcgaacttttgtcaattaatgccaatattggcatatttttgcccaaacgggtgcgatgattttgaccggaatgaaaatgttcaaaaatcaccaaaacatgatttttggacatattggagtgtattgggtgcgttcgtggcaaaaactcgcttcatgattcgctcgacgaacttttgtcaattaatgccaatattggccgacacgggtgcgatgtttttgaccggaatgaaatagttcaaaaagcaccaaaacatgattttatgacatattggattgtattgggtgcgttcgtggcaaaaactcacttcgtgatacacgcggcgaacttttgtcaatcaatgcaaatattggccgacacgggtgcgatgtttttgaccggaatgaaatagttcaaaaagcaccaaaacatgattttaggacatattggagtgtattgggttcgttcgtggcaaaaactcgcttcatgattcgctcggcgaacttttgtcaattaatgcaaatattggccgacacgggtgcgatgtttttgaccggaatgaaatagttcaaaaagcaccaacacatgatttttggacatattggagtgtattgggcgcgttcgtggcaaaaactcacttcgtgatacacgcggcgaacttttgtcaattaattccaatattggccaacacgggtgcgatgtttttgaccggaatgaaatagttcaaaaactcacaaaaacatgattttaggacatattggagtgtattgggtgcgttcgtggcaagaactcacttcgtgatatacgtggcgaacttttgtcaattaaagccaatattagcccacacgggtgttgtttttgaccggaatgaaatagttcaaaaagcacaaaaacatgattttaggacatattggagtgtattgggtgcgttcgtggcaaaaagtcacctcgtgattcgcgcggcgaacttttgtcaattaatgcaaatattggccgacacgggtgcgatgtttttgaccggaatgaaatagttcaaaaagcaccaacacatgatttttggacatattggagtgtattgggcgcgttcgtggcaaaaactcacttcgtgatacacgcggcgaacttttgtcaattaattccaatattggccaacacgggtgcgatgtttttgaccggaatgaaatagttcaaaaactcacaaaaacatgattttaggacatattggagtgtattgggtgcgttcgtggcaagaactcacttcgtgatatacgtggcgaacttttgtcaattaaagccaatattagcccacacgggtgttgtttttgaccggaatgaaatagttcaaaaagcacaaaaacatgattttaggacatattggagtgtattgggtgcgttcgtggcaaaaagtcacctcgtgattcgcgcggcgaacttttgtcaattaatgccaatattggccgacacgggtgcgatgttttgtcaattaatgcaaatattggccgacacgggtgcgatgtttttgaccggaataaaatagttcaaaaagcaccaaaacatgattttaggacatattggagtgtattgggtgcgttcgtggcaaaaagtcacctcgtgattcgcgcggcgaacttttgtcaattaatgccaatattggccgacacgggtgcgatgttttgtcaattaatgcaaatattggccgacacgggtgcgatgtttttgaccggaatgtaatagttcaaaaagcaccaaaacatgattttaagacatattggagtgtattgggtgcgttcgtggcaaaaactgacttcgtgatacacgcggcgaacttttgtcaattaatgccaatattggcatatctttgcccaaacaggtgcgatgtttttgaccggaatgaaaatgttcaaaaatcaccaaaacatgatttttggacatattggagtgtattgggtgcgttcgtggcaaaaactcgcttcatgattcgctcggcgaacttttgtcaattaatgccaatattggcatatttttccccaaacgggtgcgatgtttttgaccggaatgaaaatgttcaaaaatcaccaaaacatgatttttggacatattggagtgtattggatgcgttcgtggcaaaaactcacttcatgattcgctcggcgaacttttgtcaattaatgccagtattgcccacacgggtgcgatgtttttgaccggattgaaaaagttcaaaaatcaccaaaacatgatttttggacatattggagtgtattgggtgcgttcgtggtaaaaattcacctcgtgattcgcgcggcgaacttttgtcaattaatgccaatattgggcgacacgggtgcgatgtttttgaccagaataaaatagttcaaaaagcaccaaaacatgattttaggacatattggagtgtattgggtgcgttcgtggcaaaaactcacttcgtgatacacgcggcgaacttttgtcaattaatgccaatattggccgacacgggtgcgatgtttttgaccggaatgaaaaagttcaaaaagcaccaaaacataattttaggacatattggagtgcattgggtgcgttcgtggcaaaaactcacctcgtgattcgcgcggcaaacttttgtcaattaatgccaatattggccgacacgggtgcgatgtttttgaccggaatgaaatagttcaaaaagcaccaaaacaggattttaggacatattggagtgtattcggtgcgttcgtggcaaaaactcacttcgtgatccgcgcggcgaacttttgtcaattaatgccaatattgcccacacgggtgcgatgtttttgaccggattgaaaaagttcaaaaatcaccaaaacatgatttttggacatattggagtgtattgggtgcgttcgtggcaaaaagtcacctcgtgattcgcgcggcgaacttttgtcaattaatgccaatattggcatatttttgcccaaacaggtgcgatgtttttgaccggaatgaaaatgttcaaaaatcaccaaaacatgatttttggacatattggagtgtattgggtccgttcgtggcaaaaactcgcttcatgattcgctcggcgaacttttgtcaattaatgccaatattggcatatttttccccaaacgggtgcgatgtttttgaccggaatgaaaatgttcaaaaatcaccaaaacatgatttttggacatattggagtgtattgggtgcgttcgtggcaaaaactcacttcatgattcgctcggcgaacttttgtcaattaatgccagtattgcccacacgggtgcgatgtttttgaccggattgaaaaagttcaaaaagcaccaaaacatgatttttggacatattggagtgtattgggtgcgttcgtggcaaaaactcacttcgtgatacacgcggcgaacttttgtcaatcaatgcaaatattggccgacacgggtgcgatgtttttgaccggaatgaaatagttcaaaaagcaccaaaacatgattttaggacatattggagtgtattgggttcgttcgtggcaaaaactcgcttcatgattcgctcggcgaacttttgtcaattaatgcaaatattggccgacacgggtgcgatgtttttgaccggaatgaaatagttcaaaaagcaccaacacatgatttttggacatattggagtgtattgggcgcgttcgtggcaaaaactcacttcgtgatacacgcggcgaacttttgtcaattaattccaatattggccaacacgggtgcgatgtttttgaccggaatgaaatagttcaaaaactcacaaaaacatgattttaggacatattggagtgtattgggtgcgttcgtggcaagaactcacttcgtgatatacgtggcgaacttttgtcaattaaagccaatattagcccacacgggtgttgtttttgaccggaatgaaatagttcaaaaagcacaaaaacatgattttaggacatattggagtgtattgggtgcgttcgtggcaaaaagtcacctcgtgattcgcgcggcgaacttttgtcaattaatgccaatattggccgacacgggtgcgatgttttgtcaattaatgcaaatattggccgacacgggtgcgatgtttttgaccggaataaaatagttcaaaaagcaccaaaacatgattttaggacatattggagtgtattgggtgcgttcgtggcaaaaagtcacctcgtgattcgcgcggcgaacttttgtcaattaatgccaatattggccgacacgggtgcgatgttttgtcaattaatgcaaatattggccgacacgggtgcgatgtttttgaccggaatgaaatagttcaaaaagcaccaaaacatgattttaagacatattggagtgtattgggtgcgttcgtggcaaaaactgacttcgtgatacacgcggcgaacttttgtcaattaatgccaatattggcatatctttgcccaaacaggtgcgatgtttttgaccggaatgaaaatgttcaaaaatcaccaaaacatgatttttggacatattggagtgtattgggtgcgttcgtggcaaaaactcgcttcatgattcgctcggcgaacttttgtcaattaatgccaatattggcatatttttccccaaacgggtgcgatgtttttgaccggaatgaaaatgttcaaaaatcaccaaaacatgatttttggacatattggagtgtattgggtgcgttcgtggcaaaaactcgcttcatgattcgctcgacgaacttttgtcaattaatgccaatattggccgacacgggtgcgatgtttttgaccggaatgaaatagttcaaaaagcaccaaaacatgattttaggacatattggattgtattttgtgcgttcgtggcaaaaactcacttcgtgatacacgcggcgaacttttgtcaattaatgcaaatattggccgacacgggtgcgatgtttttgaccggaatgaaatagttcaaaaagcaccaaaacatgattttaggacatattggagtgtattgggttcgttcgtggcaaaaactcgcttcatgattcgctcggcgaacttttgtcaattaatgcaaatattggccgacacgggtgcgatgtttttgaccggaatgaaatagttcaaaaagcaccaacacatgatttttggacatattggagtgtattgggtgcgttcgtggcaaaaactcacttcgtgatacacgcggcgaacttttgtcaattaattccaatattggccaacacgggtgcgatgtttttgaccggaatgaaatagttcaaaaactcacaaaaacatgattttaggacatattggagtgtattgggtgcgttcgtggcaaaaactcacttcgtgatatacgcggcgaacttttgtcaattaaagccaatattagcccacacgggtgttgtttttgaccggaatgaaatagttcaaaaagcacaaaaacatgattttaggacatattggagtgtattgggtgcgttcgtggcaaaaagtcacctcgtgattcgcgcggcgaacttttgtcaattaatgccaatattggccgacacgggtgcgatgttttgtcaattaatgcaaatattggccgacacgggtgcgatgtttttgaccggaatgaaatagttcaaaaagcaccaaaacatgattttaagacatattggagtgtattgggtgcgttcgtggcaaaaactgacttcgtgatacacgcggcgaacttttgtcaattaatgccaatattggcatatttttgcccaaacaggtgcgatgtttttgaccggaatgaaaatgttcaaaaatcaccaaaacatgatttttggacatattggagtgtattgggtgcgttcgtggcaaaaacttgcttcatgattcgctcggcgaacttttgtcaattaatgccaatattggcatatttttccccaaacgggtgcgatgtttttgaccggaatgagatagttcaaaaagcaccaacacatgatttttggacatattggagtgtattgggtgcgttcgtggcaaaaactcacttcgtgatacacgcggcgaacttttgtcaattaatgccaatattggccaacacgggtgcgatgtttttgaccggaatgaaatagttcaaaaactcacaaaaacatgattttaggacatattggagtgtattgggtgcgttcgtggcaaaaactcacttcgtgatatacgcggcgaacttttgtcaattaaagccaatattagcccacacgggtgttgtttttgaccggaatgaaatagttcaaaaagcacaaaaacatgattttaggacatattggagtgtattgggtgcgttcgtggcaaaaactcgcttcatgattcgctcggcgaacttttgtcaattaatgcaaatattggccgacacgggtgcgatgtttttgaccggaatgaaatagttcaaaaagcaccaacacatgatttttggacatattggagtgtattgggtgcgttcgtggcaaaaactcacttcgtgatacacgcggcgaacttttgtcaattaatgccaatattggccaacacgggtgcgatgtttttgaccggaatgaaatagttcaaaaactcacaaaaacttgatttttggacatattggagtgtattgggtgcgttcgtggcaaaaactcacttcgtgatacacgcggcgaacttttgtcaattaaagccaatattagcccacacgggtgttgtttttgaccggaatgaaatagttcaaaaagcacaaaaacatgattttaggacatattggagtgtattgggtgcgttcgtggcaaaaactcgcttcatgattcgctcggcgaacttttgtcagttaatgccaatattggccgacacgggtgcgatgtttttgaccggaatgaaatagttcaaaaagcaccaaaacatgattttaggacatattggagtgtattgggtgcgttcgtggcaaaaactcacttcgtgatacacgcggcgaacttttgtctattaatgcaaatattggccgacacgggtgcgatgtttttgaccagaatgaaatagttcaaaaagcaccagcacatgatttttggacatattggagtgtattgggtgcgttcgtggcaaaaactcacttcgtgatacacgcggcgaacttttgtcaattaatgccaatattggccaacacgggtgcgatgtttttgaccggaatgaaatagttcaaaaactcacaaaaacatgattttaggacatattggagtgtattgggtgcgttcgtggcaaaaactcacttcgtgatatacgcggcgaacttttgtcaattaaagccaatattagcccagacgggtgttgtttttgaccggaatgaaatagttcaaaaagcacaaaaacatgattttaggacatattggagtgtattgggtgcgttcgtggcaaaaagtcacctcgtgatacacgcggcgaacttttgtcaattaatgacaatattggccgacacgggtgcgatgtttttgaccggaatgaaatagttcaaaaagcaccaaaacatgattttaagacatattggagtgtattgggtgcgttcgtggcaaaaactgacttcgtgatacacgcggcgaacttttgtcaattaatgccaatattggcatatttttgcccaaacaggtgcgatgtttttgaccggaatgaaaatgttcaaaaatcaccaaaacatgatttttggacatattggagtgtattgggtgcgttcgtggcaaaaactcgcttcatgattcgctcggcaaacttttgtcaattaatgccaatattggcatatttttacccaaacgggtgcgatgtttttgaccggaatgaaatagttcaaaaagcaccaaaacaggattttaggacatattggagtgtattgggtgcgttcgtggcaaaaactcacttcgtgatccgcgcggcgaacttttgtcaattaatgccaatattgcccacacgggtgcgatgtttttgaccggattgaaaaagttcaaaaatcaccaaaacatgatttttggacatattggagtgtattgggtgcgttcgtggcaaaaacacacttcgtgatacacgcggcgaacttttgtcaattaatgacaatattggccgacacgggtgcgatgtttttgaccggaatgaaaatgttcaaaaataaccaaaacatgatttttggacatattggagtgtattgggtgcgttcgtggcaaaaactcgcttcatgattcgctcggcgaacttttgtcaattaatgccaatattagccaacacgggtgcgatgtttttgaccggaattaaatagttgaaaaagcaccaaaacatgattttaggacatattggagtgtattgggtgcgttcgtggcaaaaagtcacctcgtgattcgcgcggcgaacttttgtcaattaatgccaatattggccgacaagggtgcgatgtttttgaccggaatgaaatagttcaaaaagcaccaaaacatgattttaggacatattggagtgtattggttgcgttcgtggcaaaaactcacttcgtgatacacgcggcgaacttttgtcaattaatgccaatattggcatatttttgcccaaacaggtgcgatgtttttgaccggaatgaaaatgttcaaaaatcaccaaaacatgatttttggacatattggagtgtattgggtgcgttcgtggcaaaaactcgcttcatgattcgctcggcgaacttatgtcaattaatgccaatattagcccacacgggtgcgatgtttttgaccggaatgaaatagttgaaaaagcaccaaaacatgattttaggtcatattggagtgtattgggtgcgttcgtggcaaaaagtcacctcgtgattcgcgcggcgaacttttgtcaattaatgccaatattggccgacaagggtgcgatgtttttgaccggaatgaaatagttcaaaaagcaccaaaacatgattttaggacatattggagtgtattggttgcgttcgtggcaaaaactcacgtcgtgatacacgcggcgaacttttgtcaattaatgccaatattggcatatttttgcccaaacaggtgcgatgtttttgaccggaatgaaaatgttcaaaaatcaccaaaacatgatttttggacatattggagtgtattgggtgcgttcgtggcaaaaactcgcttcatgattcgctcggcgaacttatgtcaattaatgccaatattagcccacacgggtgcgatgtttttgaccggaatgaaatagttgaaaaagcaccaaaacatgattttaggtcatattggagtgtattgggtgcgttcgtggcaaaaagtcacctcgtgattcgcgcggcgaacttttgtcaattaatgccaatattggccgacaagggtgcgatgtttttgaccggaatgaaatagttcaaaaagcaccaaaacatgattttaggacatattggagtgtattggttgcgttcgtggcaaaaactcacttcgtgatacacgcggcgaacttttgtcaattaatgccaatattggccgacaagggtgcgatgtttttgaccggaatgaaatagttcaaaaagcaccaaaacatgattttaggacatattggagtgtattggttgcgttcgtggcaaaaacacacttcgtgatacacgcggcgaacttttgtcaattaatgacaatattggccgacacgggtgcgatgtttttgaccagaatgaaatagttcaaaaagcaccaaaacataattttaggacatattggagtgcattgggtgcgttcgtggcaaaaactcacctcgtgattcgcgcggcgaacttttgtcaattaatgccaatattggccgacacgggtgcgatgtttttgaccggaatgaaatagttcaaaaagcaccaaaacataattttaggacatattggagtgtattggttgcgttcgtggcaaaaactcacttcgtgatacacgcggcgaacttttgtcaattaatgcaaatattggccgacacgggtgcgatgtttctgaccggaatgaaatagttcaaaaagcaccaacacatgatttttggacatattggagtgtattgggtgcgttcgtggcaaaaactcacttcgtgatacacgcggcgaacttttgtcaattaatgccaatattggcatatttttgcccaaacaggtgcgatgtttttgaccggaatgaaaatgttcaaaaatcaccaaaacatgatttttggacatattggagtgtattgggtgcgttcgtggcaaaaactcgcttcatgattcgctcggcgaacttatgtcaattaatgccaatattagcccacacgggtgcgatgtttttgaccggaatgaaatagttgaaaaagcaccaaaacatgattttaggtcatattggagtgtattgggtgcgttcgtggcaaaaagtcacctcgtgattcgcgcggcgaacttttgtcaattaatgccaatattggccgacaagggtgctatgtttttgaccggaatgaaatagttcaaaaagcaccaaaacatgattttaggacatattggagtgtattggttgcgttcgtggcaaaaactcacttcgtgatacacgcggcgaacttttgtcaattaatgcaaatattggccgacacgggtgcgatgtttttgaccggaatgaaatagttcaaaaagcaccaaaacatgatttttggacatattggagtgtattcggtgcgttcgtggcaagaactcgcttcatgattcgcttggcgaacttttgtcaattaatgccaatattggcatatttttgcccaaacaggtgcgatgtttttgaccggaatgaaaatgttcaaaaatcaccaaaacatgatttttggacatattggagtgtattgggtgcgttcgtggcaaaaactcgcttcatgattcgctcggcgaacttttgtcaattaatgccaatattggcatatttttgcccaaacgggtgcgatgattttgaccggaattaaaatgttcaaaaatcaccaaaacatgatttttggacatattggagtgtattgggtgcgttcgtggcaaacactcgcttcatgattcgctcggcgaacttttgtcaattaatgcaaatattggccgacaagggtgcgatgtttttgaccggaatgaaatagttcaaaaagcaccaaaacatgattttaggacatattggagtgtattggttgcgttcgtggcaaaaactcacttcgtgatacacgcggcgaacttttgtcaattaatgccaatattggcatatttttgcccaaacaggtgcgatgtttttgaccggaatgaaaatgttcaaaaatcaccaaaacatgatttttggacatattggagtgtattgggtgcgttcgtggcaaacactcgcttcatgattcgctcggcgaacttttggctattaatgcaaatattggccgacacgggtgcgatgtttttgaccggaatgaaatagttcaaaaagcaccaaaacatgattttaggacatattggagtgtattgggtgcgttcgtggcaaaaactcacttcgtgattcacgcgacgaacttttgtcaattaatgccaatattggcccacacaggagcgatgtttttgtccggaataaaatagttcaaaaagcaccaaaacatgattttaggacatattggagtgtattgggtgcgttcgtggtaaaaactcacttcgtgattcgcgcgacgaacttttgtcaattaatgccaatgttggcccacacaggagcgatgtttttgaccggaatgaaatagttcaaaaactcaccaaaacatgagtttaggacatattggagtgtattgggtgcgttcgtggcaaaaactcacttcgtgattcacgcggcgaacttttgtcaattaatgccaatattggccgaaatgggtgcgatgtttttgaccggaataaaaaagtttaaaaagtagcaaaacatgattttcggacatattagagtgtattggttgcgttcgtggcaaaatctcacttcgtgattcgcgcggcgaacttttgtcaattaatgccaatattggcccacacgggtgtgatgtttttgaccggaataaaatacatcaaaaaagcaccaaaacatgatttttggacatatcggagtgtattgggtgcgttcgtggcaaaaactcacgcgtgattcgcgtggtgaaaatttgtcaattattgccaatattggccgacacgggtgcgatgtttttgaccggaatgaaatagttcaaaaagcaccaaaacatgatttttggacatattggagtgtattgggtgcgttcgtggtaaaaactcacttcgtgattcgcgcgacgaacttttgtcaattaatgctaatgttggcccacacaggagcgatgtttttgaccggaatgaaatagttcaaaaactcaccaaaacatgagtttaggacatattggagtgtattgggtgcgttcgtggcaaaaactcacttcgtgattcgcgcgacgaacttttgtcaagtaatgccaatattggcccacacaggagcgatgtttttgaccggaatgaaacagttcaaaaactcaccaaaacatgagtttaggacatattggagtgtattgggtgcgttcgtgacaaaaactcacttcgtgattcgcgcgacgaacttttgtcaactaatgccaatattggcccacacaggagcgatgttttttaccggaatgaaatacttcaaaaactcaacaaaacatgattttaggacatattggagtgtattgggtgcgttcgtggcaaaaactcacttcgtgattcacgcggcgaacttttgtcaattaatgccaatattggccgaaatgggtgcgatgtttttgaccggaataaaaaagtttaaaaagtagcaaaacatgattttcggacatattagagtgtattgggtgcgttcgtggcaaaaactcacttcgtgattcgcgcggcgaacttttgtcaattaatgccaatattggcccacacgggtgtgatgtttttgaccggaataaaatacatcaaaaaagcaccaaaacatgatttttggacatatcggagtgtattgggtgcgttcgtggcaaaaactcacgcgtgattcgcgtggtgaaaatttgtcaattattgccaatattggccgacacgggtgcgatgtttttgaccggaatgaaatagttcaaaaagcaccaaaacatgatttttggacatattggagtgtattggttgcgttcgtggcaaaaactcacttcgtgattcgcgcggcgaacctttattaattattgccaatattggccgacacgggtgcgatgtttttgtccggaataaaatagttcaaaaagcaccaaaacatgattttaggacatattggagtgtattgggtgcgttcgtggtaaaaactcacttcgtgattcgcgcgacgaacttttgtcaattaatgccaatattggcccacacaggagcgatgtttttgaccggaatgaaatagttcaaaaactcaccaaaacatgagtttaggacatattggagtgtattgggtgcgttcgtggcaaaaactcacttcgtgattcgcgcgacgaacttttgtcaattaatgccaatattggcccacacaggagcgatgtttttgaccggaatgaaatagttcaaaaactcaccaaaacatgagtttaggacatattggagtgtattgggtgcgttcgtgacaaaaactcacttcgtgattcgtgcgacgaacttttgtcaattagtgccaatattggcccacacaggagcgatgtttttgaccggaatgaaatacttcaaaaactcaccaaaacatgattttaggacatattggagtgtattgggtgcgttcgtggcaaaaactcacttcgtgattcacgcggcgaacttttgtcaattaatgccaatattggccgacatgggtgcgatgtttttgaccggaataaaaaagtttaaaaagtagcaaaacatgattttcggacatattagagtgtattggttgcgttcgtggcaaaatctcacttcgtgattcgcgcggcgaacttttgtcaattaatgccaatattggccgacacgggtgcgatgtttttgtccggaataaaatagttcaaaaagcaccaaaacatgattttaggacatattggagtgtattgggtgcgttcgtggtaaaaactcacttcgtgattcgcgcgacgaacttttgtcaattaatgccaatattggcccacacaggagcgatgtttttgaccggaatgaaatagttcaaaaactcaccaaaacatgagtttaggacatattggagtgtattgggtgcgttcgtggtaaaaactcacttcgtgattcgcgcgacgaacttttgtcaattaatgccaatattggcccacacaggagcgatgtttttgaccggaatgaaatagttcaaaaactcaccaaaacatgagtttaggacatattggagtgtattgggtgcgttcgtggcaaaaactcacttcgtgattcgcgcgacgaacttttgtcaattaatgccaatattggcccacacaggagcgatgtttttgaccggaatgaaatagttcaaaaactcaccaaaacatgagtttaggacatattggagtgtattgggtgcgttcgtgacaaaaactcacttcgtgattcgcgcgacgaacttttgtcaactaatgccaatattggcccacacaggagcgatgtttttgaccggaatgaaatacttcaaaaactcaacaaaacatgattttaggacatattggagtgtattgggtgcgttcgtggcaaaaactcacttcgtgattcacgcggcgaacttttgtcaattaatgccaatattggccgaaatgggtgcgatgtttttgaccggaataaaaaagtttaaaaagtagcaaaacatgattttcggacatattagagtgtattggttgcgttcgtggcaaaatctcacttcgtgattcgcgcggcgaacttttgtcaattaatgccaatattggcccacacgggtgtgatgtttttgaccggaataaaatacatcaaaaaagcaccaaaacatgatttttggacatatcggagtgtattgggtgcgttcgtggcaaaaactcacgcgtgattcgcgtggtgaaaatttgtcaattattgccaatattggccgacacgggtgcgatgtttttgaccggaataaaaaagtttaaaaagtagcaaaacatgattttcggacatattagagtgtattggttgcgttcgtggcaaaatctcacttcgtgattcgcgcggcgaacttttgtcaattaattccaatattggccgacatgggtgcgatgtatttgaccggaatgaattacttcaaaaaggcaccaaaacatgattttaggacattttggagtgtattgggtgcgttcgtggcaaaaactcacttcgtgattcgcgcggcgaacttttgtcaattaatgccaatattggcccacacgggtgtgatgtttttgaccggaataaaatacatcaaaaaagcaccaaaacatgatttttggacatatcggagtgtattgggtgcgttcgtggcaaaaactcacgcgtgattcgcgcgacgaacttttgtcaattaatgccaatattggcccacacaggagcgatgtttttgaccggaatgaaatagttcaaaaactcaccaaaacatgagtttaggacatattggagtgtattgggtgcgttcgtggcaaaaactcacttcgtgattcgcgcgacgaacttttgtcaattaatgccaatattggcccacacaggagcgatgtttttgaccggaatgaaatagttcaaaaactcaccaaaacatgagtttaggacatattggagtgtattgggtgcgttcgtgacaaaaactcacttcgtgattcgcgcgacgaacttttgtcaactaatgccaatattggcccacacaggagcgatgtttttgaccggaatgaaatacttcaaaaactcaacaaaacatgattttaggacatattggagtgtattgggtgcgttcgtggcaaaaactcacttcgtgattcacgcggcgaacttttgtcaattaatgccaatattggccgaaatgggtgcgatgtttttgaccggaataaaaaagtttaaaaagtagcaaaacatgattttcggacatattagagtgtattggttgcgttcgtggcaaaatctcacttcgtgattcgcgcggcgaacttttgtcaattaataccaatattggccgacaggggtgcgatgtatttgaccggaatgaattacttcaaaaaggcaccaaaacatgattttaggacattttggagtgtattgggtgcgttcgtggcaaaaactcacgcgtgattcgcgtggtgaacttttgtcaattattgccaatattggccgacacgggtgcgatgtttttgaccggaataaaaaagtttaaaaagtagcaaaacatgattttcggacatattagagtgtattggttgcgttcgtggcaaaatctcacttcgtgattcgcgcggcgaacttttgtcaattaatgccaatattggccgacatgggtgcgatgtatttgaccggaatgaattacttcaaaaaggcaccaaaacatgattttaggacattttggagtgtactgggtgcgttcgtggcaaaaactcacttcgtgattcgcgcggcgaacttttgtcaattaatgccaatattggcccacacgggtgtgatgtttttgaccggaataaaatacatcaaaaaagcaccaaaacatgatttttggacatatcggagtgtattgggtgcgttcgtggcaaaaactcacgcgtgattcgcgtggtgaaaatttgtcaattattgccaatattggccgacacgggtgcgatgtttttgaccggaatgaaatagttcaaaaagcaccaaaacatgatttttggacatattggagtgtattggttgcgttcgtggcaaaaactcacttcgtgattcgcgcggcgaacctttattaattattgccaatattggccgacacgggtgcgatgtttttgtccggaataaaatagttcaaaaagcaccaaaacatgattttaggacatattggagtgtattgggtgcgttcgtggtaaaaactcacttcgtgattcgcgcgacgaacttttgtcaattaatgccaatattggcccacacaggagcgatgtttttgaccggaatgaaatagttcaaaaactcaccaaaacatgagtttaggacatattggagtgtattgggtgcgttcgtggcaaaaactcacttcgtgattcgcgcgacgaacttttgtcaattaatgccaatattggcccacacaggagcgatgtttttgaccggaatgaaatagttcaaaaactcaccaaaacatgagtttaggacatattggagtgtattgggtgcgttcgtgacaaaaactcacttcgtgattcgcgcgacgaacttttgtcaactaatgccaatattggcccacacaggagcgatgtttttgaccggaatgaaatacttcaaaaactcaacaaaacatgattttaggacatattggagtgtattgggtgcgttcgtggcaaaaactcacttcgtgattcacgcggcgaacttttgtcaattaatgccaatattggccgaaatgggtgcgatgtttttgaccggaataaaaaagtttaaaaagtagcaaaacatgattttcggacatattagagtgtattggttgcgttcgtggcaaaatctcacttcgtgattcgcgcggcgaacttttgtcaattaatgccaatattggccgacatgggtgcgatgtttttgaccggaataaaaaagtttaaaaagtagcaaaacatgattttcggacatattagagtgtattggttgcgttcgtggcaaaaactcacttcgtgattcgcgcggcgaacctttattaattattgccaatattggccgacacgggtgcgatgtttttgtccggaataaaatagttcaaaaagcaccaaaacatgattttaggacatattggagtgtattgggtgcgttcgtggtaaaaactcacttcgtgattcgcgcgacgaacttttgtcaattaatgccaatattggcccacacaggagcgatgtttttgaccggaatgaaatagttcaaaaactcaccaaaacatgagtttaggacatattggagtgtattgggtgcgttcgtggcaaaaactcacttcgtgattcgcgcgacgaacttttgtcaattaatgccaatattggcccacacaggagcgatgtttttgaccggaatgaaatagttcaaaaactcaccaaaacatgagtttaggacatattggagtgtattgggtgcgttcgtgacaaaaactcacttcgtgattcgcgcgacgaacttttgtcaactaatgccaatattggcccacacaggagcgatgtttttgaccggaatgaaatacttcaaaaactcaacaaaacatgattttaggacatattggagtgtattgggtgcgttcgtggcaaaaactgacttcgtgatacacgcggcgaacttttgtcaagtaatgccaatattggacgacacgggtgcgattttcttttgaccggaatgaaatacttcaaaaaagcaccaaaacatgagtttaggacatattggagtgtattgggtgcgttcgtggcaaaaactcacttcgtgattcgcgcgacgaacttttgtcaattaatgccaatattggcccacacgggtgtgatgtttttgaccggaataaaatacatcaaaaaagcaccaaaacatgatttttggacatatcggagtgtattgggtgcgttcgtggcaaaaactcacgcgtgattcgcgtggtgaaaatttgtcaattattgccaatattggccgacacgggtgcgatgtttttgaccggaatgaaatagttcaaaaagcaccaaaacatgatttttggacatattggagtgtattggttgcgttcgtggcaaaaactcacttcgtgattcgcgcggcgaacctttattaattattgccaatattggccgacacgggtgcgatgtttttgtccggaataaaatagttcaaaaagcaccaaaacatgattttaggacatattggagtgtattgggtgcgttcgtggtaaaaactcacttcgtgattcgcgcgacgaacttttgtcaattaatgccaatattggcccacacaggagcgatgtttttgaccggaatgaaatagttcaaaaactcaccaaaacttgagtttaggacatattggagtgtattgggtgcgttcgtggcaaaaactcacttcgtgattcacgcgacgaacttttgtcaattaatgccaatattggcccacacaggagcgatgtttttgtccggaataaaatagttcaaaaagcaccaaaacatgattttaggacatattggagtgtattgggtgcgttcgtggtaaaaactcacttcgtgattcgcgcgacgaacttttgtcaattaatgccaatgttggcccacacaggagcgatgtttttgaccggaatgaaatagttcaaaaactcaccaaaacatgagtttaggacatattggagtgtattgggtgcgttcgtggcaaaaactcacttcgtgattcacgcggcgaacttttgtcaattaatgccaatattggccgaaatgggtgcgatgtttttgaccggaataaaaaagtttaaaaagtagcaaaacatgattttcggacatattagagtgtattggttgcgttcgtggcaaaatctcacttcgtgattcgcgcggcgaacttttgtcaattaatgccaatattggccgacatgggtgcgatgtatttgaccggaatgaattacttcaaaaaggcaccaaaacatgattttaggacattttggagtgtattgggtgcgttcgtggcaaaaactcacttcgtgattcgcgcggcgaacttttgtcaattaatgccaatattggcccacacgggtgtgatgtttttgaccggaataaaatacatcaaaaaagcaccaaaacatgatttttggacatatcggagtgtattgggtgcgttcgtggcaaaaactcacgcgtgattcgcgtggtgaaaatttgtcaattattgccaatattggccgacacgggtgcgatgtttttgaccggaatgaaatagttcaaaaagcaccaaaacatgatttttggacatattggagtgtattggttgcgttcgtggcaaaaactcacttcgtgattcgcgcggcgaacctttattaattattgccaatattggccgacacgggtgcgatgtttttgtccggaataaaatagttcaaaaagcaccaaaacatgattttaggacatattggagtgtattgggtgcgttcgtggtaaaaactcacttcgtgatttgcgcgacgaacttttgtcaattattgccaatattggcccacacaggtgcgatgtttttgaccggaatgaaatacttcaaatagcaccaaaacatgatttttggacatattggagtgtattgggtgcgttcgtggcaaaaactcacttcgtgatacacgcggcgaacttttgtcaattaatgccaatattagcccacacaggtgcgatgtttttgaccggaatgaaatagttcaaaaagcaccaaaacatgattttaggacatattggagtgtattgggtgcattcgtggtaaaaactcatgtcgtgattcgcgcggcgaacctttatcaattattgccaatattggccgacacgggtgcgatgtttttgtccggaataaaatagttcaaaaagcaccaaaacatgattttaggacatattggagtgtattgggtgcgttcgtggtaaaaactcacttcgtgattcgcgcgacgaacttttgtcaattaatgccaatattggcccacacaggagcgatgtttttgaccggaatgaaatagttcaaaaactcaccaaaacatgagtttaggacatattggagtgtattgggtgcgttcgtggcaaaaactcacttcgtgattcgcgcgacgaacttttgtcaattaatgccaatattggccgacacgggagcgatgtttttgaccggaatgaaatagttcaaaaagcaccaaaacatgattttaggacatattggagtgtattgggtgcgttcgtggcaaaaactcacttcgtgattcgcgcgacgaacttttgtcaattagtgccaatattggcccacacaggagcgatgtttttgaccggaatgaaatacttcaaaaactcaccaaaacatgattttaggacatattggagtgtattgggtgcgttcgtggcaaaaactcacttcgtgattcacgcggcgaacttttgtcaattaatgccaatattggccgacatgggtgcgatgtttttgaccggaataaaaaagtttaaaaagtagcaaaacatgattttcggacatattagagtgtattggttgcgttcgtggcaaaatctcacttcgtgattcgcgcggcgaacttttgtcaattaatgccaatattggccgacatgggtgcgatgtatttgaccggaatgaattacttcaaaaaggcaccaaaacatgattttaggacattttggagtgtattgggtgcgttcgtggcaaaaactcacttcgtaattcgcgcggcgaacctttctcaataaatgccaatattggtcgacacgggtgcgatgtatttgaccggaatgaaatacttcaaaaaagcaccaaaacatgatttttagacatattggagtgtattgggtgcgttcgtggcaaaaactgacttcgtgatacacgcggcgaacgtttgtcaagtaatgccaatattggccgacacgggtgcgattttcttttgaccggaatgaaatacttcaaaaaagcaccaaaacatgattttaggacatattggagtatattgggtgcgttcgtggcaaaaactcacttcgtgatttgcgcggcaaacctttgtcaattattgccaatattggccgacacgggtgcgatgtttttgaccggaatgaaatacttcaaatagcaccaaaacatgatttttggacatattggagtgtattgggtgcgttcgtggcaaaaactcacttcgtgatacacgcggcgaacctttattaattattgccaatattggccgacacgggtgcgatgtttttgtccggaataaaatagttcaaaaagcaccaaaacatgattttaggacatattggagtgtattgggtgcgttcgtggcaaaaactcacttcgtgattcgtgtggcgaacctttgtcaattattgcagatattggccgacacgggtgcgatgtttttgaccggaatgaaatagttcaaaaagcaccaaaacatgattttaggacatattggagtgtattgggtgtgttcgtggcaaaaactcacttcgtgattcgcgcgacgaacctttgtcaattattgcagatattggccgacacaggtgcgatgtttttgaccggaatgaaatagttcaaaaactcaccaaaacatgagtttaggacatattggagtgtattgggtgcgttcgtgacaaaaactcacttcgtgattcgcgcgacgaacatttgtcaactaatgccaatattggcccacacaggagcgatgtttttgaccggaatgaaatacttcaaaaactcaacaaaacatgattttaggacatattggagtgtattgggtgcgttcgtggcaaaaactcacttcgtgattcacgcggcgaacttttgtcaattaatgccaatattggccgaaatgggtgcgatgtttttgaccggaataaaaaagtttaaaaagtagcaaaacatgattttcggacatattagagtgtattggttgcgttcgtggcaaaatctcacttcgtgattcgcgcggcgaacttttgtcaattaataccaatattggccgacaggggtgcgatgtatttgaccggaatgaattacttcaaaaaggcaccaaaacatgattttaggacattttggagtgtattgggtgcgttcgtggcaaaaactcacgcgtgattcgcgtggtgaaaatttgtcaattattgccaatattggccgacacgggtgcgatgtttttgaccggaatgaaatagttcaaaaagcaccaaaacatgatttttggacatattggagtgtattggttgcgttcgtggcaaaaactcacttcgtgattcgcgcggcgaacctttattaattattgccaatattggccgacacgggtgcgatgtttttgtccggaataaaatagttcaaaaagcaccaaaacatgattttaggacatattggagtgtattgggtgcgttcgtgacaaaaactcacttcgtgattcgcgcgacgaacttttgtcaactaatgccaatattggcccacacaggagcgatgtttttgaccggaatgaaatacttcaaaaactcaacaaaacatgattttaggacatattggagtgtattgggtgcgttcgtggcaaaaactcacttcgtgattcacgcggcgaacttttgtcaattaatgccaatattggccgaaatgggtgcgatgtttttgaccggaataaaaaagtttaaaaagtagcaaaacatgattttcggacatattagagtgtattggttgcgttcgtggcaaaatctcacttcgtgattcgcgcggcgaacttttgtcaattaatgccaatattggcccacacgggtgtgatgtttttgaccggaataaaatacatcaaaaaagcaccaaaacatgatttttggacatatcggagtgtattgggtgcgttcgtggcaaaaactcacgcgtgattcgcgtggtgaaaatttgtcaattattgccaatattggccgacacgggtgcgatgtttttgaccggaatgaaatagttcaaaaagcaccaaaacatgatttttggacatattggagtgtattggttgcgttcgtggcaaaaactcacttcgtgattcgcgcggcgaacctttattaattattgccaatattggccgacacgggtgcgatgtttttgtccggaataaaatagttcaaaaagcaccaaaacatgattttaggacatattggagtgtattgggtgcgttcgtggtaaaaactcacttcgtgatttgcgcgacgaacttttgtcaattattgccaatattggcccacacaggtgcgatgtttttgaccggaatgaaatacttcaaatagcaccaaaacatgatttttggacatattggagtgtattgggtgcgttcgtggcaaaaactcacttcgtgatacacgcggcgaacttttgtcaattaatgccaatattagcccacacaggtgcgatgtttttgaccggaatgaaatagttcaaaaagcaccaaaacatgattttaggacatattggagtgtattgggtgcgttcgtggcaaaaactcacttcgtgattcgtgtggcgatcctttgtcaattattgcagatattggccgacacaggtgcgatgtttttgacccggaatgaatagttgaaaaagcaccaaacatgattttaggacatattggagtgtattgggtgcgttcgtggcaaaaactcacttcgtgatacacgcggcgaacttttgtcaattaatgccaatattagcccacacaggtgcgatgtttttgaccggaatgaaatagttcaaaaagcaccaaaacatgagtttaggacatattggagtgtattgggtgcgttcgtggcaaaaactcacttcgtgatacacgcggcgaacttttgtcaattaatgccaatattagcccacacaggtgcgatgtttttgaccggaatgaaatagttccaaaagcaccaaaacatgattttaggacatattggagtgtattgggtgcgtttgtggcaaaaactcacttcatgattcgcgcggcgaacttttgtcaattaatggcaatattagcccatacgggtgcgatgtttttgaccggaatgaaatagttaaaaaagcaccaaaacatgattttaagacatattggagtgtattgggtgcgttcgtggcaaaaactcacttcgtgattcgcgcggcgaacttttctcaattaatgccaatattggccgacacgggtgcgatgtttttgaccggaatgaaatacttcaaaaaagcaccaaaacatgattttaggacatattggagtgtattcggtgcgttcgtggcaaaagctcacttcgtgattcgcgcggcgaacttttgtcaattattgcagatattggccgacacgggtgcgatgtttttgaccggaatgaaatagttcaaaaagcaccaaaacaagatttttggacatattggagtgtattgggtgcgttcgtggcaaaaactcacttcgtgattcgcgcgacgaacatgggtgcaatgtttttgaccggaatgaaaattttcaaaaagtagcaaaacatgagttttggacatattggagtgtgttgggtgcgttcctggcaaaaactcacttcgtgattcgcgcggcgaacttttgtcaattattgccaatataggccgacatgggtacgatgtttttgaccagaatcaaaaagtctaaaaagcaccaaaacatgatttttggacatattagactttatagggtgcgttcgtggcaaaaactcacttcgtgattcgcgcggcgaacttttgtcaattatagcagatattggccgacacgggtgcgatgtttttgaccggaatgaaatagttcaaaaagcaccaaaacatgatttttggacatattggagtgtattgggtgcgttcgtggcaaaaactcacttcgtgattcgcgcggcgaacctttctcaattaatgccagtattggccgacaagagtgcgatgtttttgaccggaatgaaatacttcaaaaaagcaccaaaacatgattttaggacatattggagtgtattgggtgcgttcgtggcaaaaactcacttcgtgattcgcgcgacgaacttttgtcaattaatgccaatattggccaacatgggtgcgatgtttttgaccggaatgaaaattttcaaaaagcagcaaaatatgatttttggacatattggagtatattaggtgcgttcctggcaaaaactcacttcgtgattcgcgcggcgaacttttgtcaattattgacaatataggccgacatgggtacgatgtttttgaccggaatcaaaaagtccaaaaagcaccaaaacatgatttttggacatattagactttattgggtgcgttcgtggcaaaacctcacttcgtgattcgcgcggcgaacttttgtcaactaacgccaatattgtcaattttggaccacacggatgcgatgtttttgaccggaatgaaaaagttgaaaaagcaccaaaacaagatttttggtcatattggactgtattgggtgcgttcgtggcaaaaactcacttcgtgattcgcgcgacgaacttttgtcaattaatgccaatattggccgacatgggtgcgatgtatttgaccggaatgaattacttcaaaaaggcaccaaaacatgattttaggacaaattggagtgtattgggtgcgttcgtggcaaaaactcacttcgtgattcgcgcggcgaaatgttgtcaattaatgcctatattggcccacacgggtgcgatgttttttaccggaatgaaaaagttcaaaaagaaccaaaacatgattttaggacatattggagtgtattgggtgcgttcgtggcaaaaactcacttcgtgattcgcgcggcgaacctttctcaataaaagccaatattggtcgacacgggtgcgatgtatttgaccggaatgaaatacttcaaaaaagcaccaaaacatgatttttagacatattggagtgtattgggtgcgttcgtggcaaaaactgacttcgtgatacacgcggcgaacttttgtcaagtaatgccaatattggccgacacgggtgcgattttcttttgaccggaatgaaatacttcaaaaaagcaccaaaacatgattttaggacatattggagtttattgggtgcgttcgtggcaaaaactcacttcgtgatttgcgcggcgaaccattgtcaattattgccaatattggccgacacgggtgcgatgtttttgaccggaatgaaatacttcaaatagcaccaaaacatgatttttggacatattggagtgtattgggtgcgttcgtggcaaaaactcaattcgtgatacacgcggcgaacttttgtcaattaatgccaatattagcccacacaggtgcgatgtttttgaccggaaagaaatagttcaaaaagcaccaaaacatgattttaggacatattggagtgtattgggtccattcgtggtaaaaactcatgtcgcgattcgcgcggcgaacctttattaattattgccaatattggccgacgcgggtgcgatgtttttgtccggaataaaatagttcaaaaagaaccaaaacatgattttaggacatattggagtgtattgggtgcgttcgtggtaaaaactcacttcgtgattcgcgcgacgaacttttgtcaattaatgccaatgttgtcccacacaggagcgatgtttttgaccggaatgaaatagttcaaaaactcaccaaaacatgagtttaggacatattggagtgtattgggtgcgttcgtgacaaaaactcacttcgtgattcgcgcgacgaacttttgtcaactaatgccaatattggcccacacaggagcgatgtttttgaccggaatgaaatacttcaaaaactcaacaaaacatgattttaggacatattggagtgtattgggtgcgttcgtggcaaaaactcacttcgtgattcacgcggcgaacttttgtcaattaatgccaatattggccgaaatgggtgcgatgtttttgaccggaataaaaaagtttaaaaagtagcaaaacatgattttcggacatattggagtgtattgggtgcgttcgtggtaaaaactcacttcgtgattcgcgcgacgaacttttgtcaattaatgccaatattggcccacacgggtgcgaggtttttgactggacttaaaatgttcaaaaagcaccaaaacatgatttttggacatattggagtgtattgggtgcgttcttgacaaaaactcacttcgtgattcgcgcggcgaacttttgtcaattaatgctaatattggcccacacgggtgcgatgtttttgaccggaatgaaaaagttcaaaaactcaccaaaacatgagtttaggacatattggagtgtattgggtgcgttcgtggcaaaaactcacttcgtgattcgagcgacgaacttttgtcaattaatgccaatattggcccacacaggagcgatgtttttgaccggaatgaaacagttcaaaaactcactaaaacatgagtttaggacatattggagtgtattgggtgcgttcgtgacaaaaactcacttcgtgattcgctcgacgaacttttgtcaactaatgccaatattggcccacacaggagcgatgtttttgaccggaatgaaatacttcaaaaactcaacaaaacatgattttaggacatattggagtgtattgggtgcgttcgtggcaaaaactcacttcgtgattcacgcggcgaacttttgtcaattaatgccaatattggccgaaatgggtgcgatgtttttgaccggaataaaaaagtttaaaaagtagcaaaacatgattttcggacatattagagtgtattggttgcgttcgtggcaaaatctcacttcgtgattcgcgcggcgaacttttgtcaattaattccaatattggccgacatgggtgcgatgtatttgaccggaatgaattacttcaaaaaggcaccaaaacatgattttaggacattttggagtgtattgggtgcgttcgtggcaaaaactcacttcgtgattcgcgcggcgaacttttgtcaattaatgccaatattggcccacacgggtgtgatgtttttgaccggaatgaattacttcaaaaaggcaccaaaacatgattttaggacattttggagtgtactgggtgcgttcgtggcaaaaactcacttcgtgattcgcgcggcgaacttttgtcaattaatgccaatattggcccacacgggtgtgatgtttttgaccggaataaaatacatcaaaaaagcaccaaaacatgatttttggacatatcggagtgtattgggtgcgttcgtggcaaaaactcacgcgtgattcgcgtggtgaaaatttgtcaattattgccaatattggccgacacgggtgcgatgtttttgaccggaatgaaatagttcaaaaagcaccaaaacatgatttttggacatatcggagtgtattgggtgcgttcgtggcaaaaactcacgcgtgattcgcgtggtgaaaatttgtcaattattgccaatattggccgacacgggtgcgatgtttttgaccggaatgaaatagttcaaaaagcaccaaaacatgatttttggacatattggagtgtattggttgcgttcgtggcaaaaactcacttcgtgattcgcgcggcgaacctttattaattattgccaatattggccgacacgggtgcgatgtttttgtccggaataaaatagttcaaaaagcaccaaaacatgattttaggacatattggagtgtattgggtgcgttcgtggtaaaaactcacttcgtgattcgcgcgacgaacttttgtcaattaatgccaatattggcccacacaggagcgatgtttttgaccggaatgaaatagttcaaaaactcaccaaaacatgagtttaggacatattggagtgtattgggtgcgttcgtggcaaaaactcacttcgtgattcgcgcgacgaacttttgtcaattaatgccaatattggcccacacaggagcgatgtttttgaccggaatgaaatagttcaaaaactcaccaaaacatgagtttaggacatattggagtgtattgggtgcgttcgtgacaaaaactcacttcgtgattcgcgcgacgaacttttgtcaactaatgccaatattggcccacacaggagcgatgtttttgaccggaatgaaatacttcaaaaactcaacaaaacatgattttaggacatattgagtgtattgggtgcgttcgtggcaaaaactcacttcgtgattcacgcggcgaacttttgtcaattaatgccaatattggccgaaatgggtgcgatgtttttgaccggaataaaaaagtttaaaaagtagcaaaacatgattttcggacatattagagtgtattggttgcgttcgtggcaaaatctcacttcgtgattcgcgcggcgaacttttgtcaattaatgccaatattggccgacacgggtgcgatgtttttgtccggaataaaatagttcaaaaagcaccaaaacatgattttaggacatattggagtgtattgggtgcgttcgtggcaaaaactcacttcgtgattcgcgcgacgaacttttgtcaactaatgccaatattggcccacacaggagcgatgtttttgaccggaatgaaatacttcaaaaactcaacaaaacatgattttaggacatattggagtgtattgggtgcgttcgtggcaaaaactcacttcgtgattcacgcggcgaacttttgtcaattaatgccaatattggccgaaatgggtgcgatgtttttgaccggaataaaaaagtttaaaaagtagcaaaacatgattttcggacatattagagtgtattggttgcgttcgtggcaaaatctcacttcgtgattcgcgcggcgaacttttgtcaattaattccaatattggccgacatgggtgcgatgtatttgaccggaatgaattacttcaaaaaggcaccaaaacatgattttaggacattttggagtgtattgggtgcgttcgtggcaaaaactcacttcgtgattcgcgcggcgaacttttgtcaagtaatgccaatattggcccacacgggtgcgattttcttttgaccggaatgaaatacttcaaaaaagcaccaaaacatgattttaggacatattggagtgtattgggtgcgttcgtggcaaaaactcacttcgtaattcgcgcggcgaacctttgtcaattattgccaatattggccgacacgggtgcgatgtttttgaccggaatgaaatacttcaaatagcaccaaaacatgatttttggacatattggagtgtattgggtgcgttcgttgcaaaaactcgcttcgtgattcgcgcggcgaaattttgtcaattaatgccaatattggccgacacgggtgcgatatttttgtccagaatgaaatagttcaaaaagcaccaaaacatgatttttggacaaattggagtgtattgggtgcgttcgtggcaaaaactcacttcgtgattcgcgcggcgaacttttctcaattaatccaatattggccgacacgggtgcgatgtttttgaccggaatgaaatacttcaaatagcaccaaaacatgatttttggacatattggagtgtattgggtgcgttcgtggcaaaaactcacttcgtgatacacgcggcgaacttttgtcaattaatgcaaatattggccgacacgggtgcgatgtttttgaccggaatgaaatagttcaaaaagcaccaaaacaggattttaggacatattggagtgtattcggtgcgttcgtggcaaaaactcacttcgtgatccgcgcggcgaacttttgtcaattaatgccaatattgcccacacgggtgcgatgtttttgaccggattgaaaaagttcaaaaatcaccaaaacatgatttttggacatattggagtgtattgggtgcgttcgtggcaaaaagtcacctcgtgattcgcgcggcgaacttttgtcaattaatgccaatattggcatatttttgcccaaacaggtgcgatgtttttgaccggaatgaaaatgttcaaaaatcaccaaaacatgatttttggacatattggagtgtattgggtccgttcgtggcaaaaactcgcttcatgattcgctcggcgaacttttgtcaattaatgccaatattggcatatttttccccaaacgggtgcgatgtttttgaccggaatgaaaatgttcaaaaatcaccaaaacatgatttttggacatattggagtgtattgggtgcgttcgtggcaaaaactcacttcatgattcgctcggcgaacttttgtcaattaatgccagtattgcccacacgggtgcgatgtttttgaccggattgaaaaagttcaaaaatcaccaaaacatgatttttggacatattggagtgtattgggtgcgttcgtggtaaaaattcacctcgtgattcgcgcggcgaacttttgtcaattaatgccaatattgggcgacacgggtgcgatgtttttgaccagaataaaatagttcaaaaagcaccaaaacatgattttaggacatattggagtgtattgggtgcgttcgtggcaaaaactcacttcgtgatacacgcggcgaacttttgtcaattaatgcaaatattggccgacacgggtgcgatgtttttgaccggaatgaaatagttcaaaaagcaccaaaacatgattttaggacatattggagtgtattgggttcgttcgtggcaaaaactcgcttcatgattcgctcggcgaacttttgtcaattaatgcaaatattggccgacacgggtgcgatgtttttgaccggaatgaaatagttcaaaaagcaccaacacatgatttttggacatattggagtgtattgggtgcgttcgtggcaaaaactcacttcgtgatacacgcggcgaacttttgtcaattaattccaatattggccaacacgggtgcgatgtttttgaccggaatgaaatagttcaaaaactcacaaaaacatgattttaggacatattggagtgtattgggtgcgttcgtggcaaaaactcacttcgtgatatacgcggcgaacttttgtcaattaaagccaatattagcccacacgggtgttgtttttgaccggaatgaaatagttcaaaaagcaccaaaacatgattttaggacatattggagtgtattgggtgcgttcgtggcaaaaagtcacctcgtgattcgcgcggcgaacttttgtcaattaatgccaatattggccgacacgggtgcgatgttttgtcaattaatgcaaatattggccgacacgggtgcgatgtttttgaccggaatgaaatagttcaaaaagcaccaaaacatgatttttggacatattggagtgtattgggtgcgttcgtggcaaaaactcgcttcatgattcgcttggcgaacttttgtcaattaatgccaatattggcatatttttgcccaaacaggtgcgatgtttttgaccggaatgaaaatgttcaaaaatcaccaaaacatgatttttggacatattggagtgtattgggtgcgttcgtggcaaaaactcgcttcatgattcgctcggcgaacttttgtcaattaatgccaatattgtcatatttttacccaaacgggtgcgatgattttgaccggaatgaaaatgttcaaaaatcaccaaaacatgatttttggacatattggagtgtattgggtgcgttcgtggcaaaaactcgcttcatgattcgctcgacgaacttttgtcaattaatgccaatattggccgacacgggtgcgatgtttttgaccggaatgaaatagttcaaaaagcaccaaaacatgattttaggacatattggattgtattttgtgcgttcgtggcaaaaactcacttcgtgatacacgcggcgaacttttgtcaattaatgcaaatattggccgacacgggtgcgatgtttttgaccggaatgaaatagttcaaaaagcaccaaaacatgattttaggacatattggagtgtattgggtgcgttcgtggcaaaaactcgcttcatgattcgctcgacgaacttttgtcaattaatgccaatattggccgacacgggtgcgatgtttttgaccggaatgaaatagttcaaaaagcaccaaaacatgattttaggacatattggattgtattttgtgcgttcgtggcaaaaactcacttcgtgatacacgcggcgaacttttgtcaattaatgcaaatattggccgacacgggtgcgatgtttttgaccggaatgaaatagttcaaaaagcaccaaaacaggattttaggacatattggagtgtattcggtgcgttcgtggcaaaaactcacttcgtgatccgcgcggcgaacttttgtcaattaatgccaatattggccgacacgggtgcgaggttttgtcaattaatgcaaatattggccgacacgggtgcgatgtttttgaccggaatgaaatagttcaaaaagcaccaaaacatgatttttggacatattggagtgtattgggtgcgttcgtggcaaaaactcgcttcatgattcgcttggcgaacttttgtcaattaatgccaatattggcatatttttgcccaaacaggtgcgatgtttttgaccggaatgaaaatgttcaaaaatcaccaaaacatgatttttggacatattggagtgtattgggtccgttcgtggcaaaaactcgcttcatgattcgctcggcgaacttttgtcaattaatgccaatattggcatatttttccccaaacgggtgcgatgtttttgaccggaatgaaaatgttgaaaaatcaccaaaacatgatttttggacatattggagtgtattgggtgcgttcgtggtaaaaattcacctcgtgattcgcgcggcgaacttttgtcaattaatgccaatattgggcgacacgggtgcgatgttttgtcaattaatgcaaatattggccgacacgggtgcgatgtttttgaccggaatgtaatagttcaaaaagcaccaaaacatgattttaagacatattggagtgtattgggtgcgttcgtggcaaaaacacacttcgtgatacacgcggcgaacttttgtcaattaatgacaatattggccgacacgggtgcgatgtttttgaccagaatgaaatagttcaaaaagcaccaaaacataattttaggacatattggagtgcattgggtgcgttcgtggcaaaaactcgcttcatgattcgctcggcgaacttttgtcaattaatgccaatattgtcatatttttacccaaacgggtgcgatgattttgaccggaatgaaaatgttcaaaaatcaccaaaacatgatttttggacatattggagtgtattgggtgcgttcgtggcaaaaactcgcttcatgattcgctcgacgaacttttgtcaattaatgccaatattggccgacacgggtgcgatgtttttgaccggaatgaaatagttcaaaaagcaccaaaacatgattttaggacatattggagtgtattgggtgcgttcgtggcaaaaactcacttcgtgattcgcgcgacgaacttttgtcaattaatgccaatattggcccacacaggagcgatgtttttgaccggaatgaaatagttcaaaaactcaccaaaacatgagtttaggacatattggagtgtattgggtgcgttcgtgacaaaaactcacttcgtgattcgcgcgacgaacttttgtcaactaatgccaatattggcccacacaggagcgatgtttttgaccggaatgaaatacttcaaaaactcaacaaaacatgattttaggacatattggagtgtattgggtgcgttcgtggcaaaaactcacttcgtgattcacgcggcgaacttttgtcaattaatgccaatattggccgaaatgggtgcgatgtttttgaccggaataaaaaagtttaaaaagtagcaaaacatgattttcggacatattagagtgtattggttgcgttcgtggcaaaatctcacttcgtgattcgcgcggcgaacttttgtcaattaattccaatattggccgacatgggtgcgatgtatttgaccggaatgaattacttcaaaaaggcaccaaaacatgattttaggacattttggagtgtattgggtgcgttcgtggcaaaaactcacttcgtgattcgcgcggcgaacttttgtcaattaatgccaatattggcccacacgggtgtgatgtttttgaccggaataaaatacatcaaaaaagcaccaaaacatgatttttggacatatcggagtgtattgggtgcgttcgtggcaaaaactcacgcgtgattcgcgtggtgaaaatttgtcaattattgccaatattggccgacacgggtgcgatgtttttgaccggaatgaaatagttcaaaaagcaccaaaacatgatttttggacatattggagtgtattggttgcgttcgtggcaaaaactcacttcgtgattcgcgcggcgaacttttattaattattgccaatattggcatatttttgcccaaacaggtgcgatgtttttgaccggaatgaaaatgttcaaaaatcaccaaaacatgatttttggacatattggagtgtattgggtgcgttcgtggcaaaaactcgcttcatgattcgctcggcaaacttttgtcaattaatgccaatattggcatatttttacccaaacgggtgcgatgtttttgaccggaatgaaatagttcaaaaagcaccaaaacatgattttaggacatattggagtgtattggttgcgttcgtggcaaaaactcacttcgtgatacacgcggcgaacttttgtcaattaatgcaaatattggccgacacgggtgcgatgtttttgaccggaatgaaatagttcaaaaagcaccaaaacatgatttttggacatattggagtgtattgggtgcgttcgtggcaaaaactcgcttcatgattcgcttggcgaacttttgtcaattaatgccaatattggcatatttttgcccaaacaggtgcgatgtttttgaccggaatgaaaatgttcaaaaatcaccaaaacatgatttttggacatattggagtgtattgggtccgttcgtggcaaaaactcgcttcatgattcgctcggcgaacttttgtcaattaatgccaatattggcatatttttccccaaacgggtgcgatgtttttgaccggaatgaaaatgttgaaaaatcaccaaaacatgatttttggacatattggagtgtattgggtgcgttcgtggtaaaaattcacctcgtgattcgcgcggcgaacttttgtcaattaatgccaatattgggcgacacgggtgcgatgtttttgaccagaataaaatagttcaaaaagcaccaaaacatgattttaggacatattggagtgtattgggtgcgttcgtggcaaaaactcacttcgtgatacacgcggcgaacttgtcaattaatgccaatattggccgacacgggtgcgatgtttttgaccggaatgaaatagttcaaaaagcaccaaaacataattttaggacatattggagtgcattgggtgcgttcgtggcaaaaactcacctcgtgattcgcgcggcgaacttttgtcaattaatgccaatattggccgacacgggtgcgatgtttttgaccggaatgaaatagttcaaaaagcaccaaaacaggattttaggacatattggagtgtattcggtgcgttcgtggcaaaaactcacttcgtgatccgcgcggcgaacttttgtcaattaatgccaatattgcccacacgggtgcgatgtttttgaccggattgaaaaagttcaaaaatcaccaaaacatgatttttggacatattggagtgtattgggtgcgttcgtggcaaaaagtcacctcgtgattcgcccggcgaacttttgtcaattaatgcaaatattggccgacacgggtgcgatgtttttgaccggaatgaaatagttcaaaaagcaccaaaacatgatttttggacatattggagtgtattgggtgcgttcgtggcaaaaactcgcttcatgattcgcttggcgaacttttgtcaattaatgccaatattggcatatttttgcccaaacaggtgcgatgtttttgaccggaatgaaaatgttcaaaaatcaccaaaacatgatttttggacatattggagtgtattgggtccgttcgtggcaaaaactcgcttcatgattcgctcggcgaacttttgtcaattaatgccaatattggcatatttttccccaaacgggtgcgatgtttttgaccggaatgaaaatgttgaaaaatcaccaaaacatgatttttggacatattggagtgtattgggtgcgttcgtggtaaaaattcacctcgtgattcgcgcggcgaacttttgtcaattaatgccaatattgggcgacacgggtgcgatgtttttgaccagaataaaatagttcaaaaagcaccaaaacatgattttaggacatattggagtgtattgggtgcgttcgtggcaaaaactcacttcgtgatacacgcggcgaacttgtcaattaatgccaatattggccgacacgggtgcgatgtttttgaccggaatgaaaaagttcaaaaagcaccaaaacataattttaggacatattggagtgcattgggtgcgttcgtggcaaaaactcacctcgtgattcgcgcggcaaacttttgtcaattaatgccaatattggccgacacgggtgcgatgtttttgaccggaatgaaatagttcaaaaagcaccaaaacaggattttaggacatattggagtgtattgggtgcgttcgtggcaaaaactcacttcgtgattcgtgtggcgaacctttgtcaattattgcagatattggccgacacgggtgcgatgtttttgaccggaatgaaatagttcaaaaagcaccaaaacatgattttaggacatattggagtgtattgggtgtgttcgtggcaaaaactcacttcgtgattcgcgcgacgaacctttgtcaattattgcagatattggccgacacaggtgcgatgtttttgaccggaatgaaatagttcaaaaactcaccaaaacatgagtttaggacatattggagtgtattgggtgcgttcgtgacaaaaactcacttcgtgattcgcgcgacgaacatttgtcaactaatgccaatattggcccacacaggagcgatgtttttgaccggaatgaaatacttcaaaaactcaacaaaacatgattttaggacatattgagtgtattgggtgcgttcgtggcaaaaactcacttcgtgattcacgcggcgaacttttgtcaattaatgccaatattggccgaaatgggtgcgatgtttttgaccggaataaaaaagtttaaaaagtagcaaaacatgattttaggacatattagagtgtattggttgcgttcgtggcaaaatctcacttcgtgattcgcgcggcgaacttttgtcaattaatgccaatattggccgacatgggtgcgatgtatttgaccggaatgaattacttcaaaaaggcaccaaaacatgattttaggacattttggagtgtattgggtgcgttcgaggcaaaaactcacttcgtgattcgcgcggcgaaatgttgtcaattaatgccaatattggccgacacgggtgcgatattttttaccggaatgaaaaagttcaaaaagcaccaaaacatgattttaggacatattggagtgtattgggtgcgttcgtggcaaaaactcacttcgtgattcgcgcggcgaacctttctcaataaatgccaatattggtcgactcgggtgcgatgtatttgaccggaatgaaatacttcaaaaaagcaccaaaacatgatttttagacatattggagtgtattgggtgcgttcgtggcaaaaactgacttcgtgattcgcgcgacgaacttttgtcaactaacgccaatattgacaattttggaccacacggatgcgatatttttgtccagaatgaaaaagttgaaaaagcaccaaaacatgatttttggacttataggagtgtattgggtgcgttcgtggcaaaaactcacttcgtgattcgcgcgacgaacttttgtcaattaatgccaatattggccgacatgggtgcaatgtttttgaccggaatgaaaattttcaaaaagcagtaaaacatgatttttggacatattggagtgtattgggtgcgttcctcgcaaaaactcacttcgtgattcgcgcggcgaacttttgtcaattaatgccaatattggccgacatgggtacgatgtttttgaccggaatcaaaaagcccaaaaagcaccaaaacatgatttttggacatattagactttattgggtgcgttcgtggcaaaaactcacttcgtgattcgcgcggcgaacttttgtcaactaacgccaatattgtcaattttggaccacacggatgcgatgtttttgaccggaatgaaaaagttgaaaaagcaccaaaacaagatttttggacatattggactgtattgggtgcgttcgtggcaaaaactcacttcgtgattcgcgcgacgaacttttgtcaattaatgccaatattggccaacatgggtgcgatgtttttgaccggaatgaaaattttcaaaaagcagcaaaacatgatttttggacatattggagtgtgttgggtgcgttcctggcaaaaactcacttcgtgattcgcggggcgaacttttgtcaattattgacaatataggccgacatgggtacgatgtttttgaccagaatcaaaaagtccaaaaagcaccaaaacatgatttttggacatattagactttattgggttcgttcgtggtaaaaactcacttcgtgattcgcgcggcgaacttttgtcaactaacgccaatattggcaattttggaccacacggatgcgatgtttttgaccggaatgaaaaagttgaaaaagcaccaaaacatgatttttggacatattggactttattgggtgcgttcgtggcaaaaactcacttcgtgattcgcgcggcaaaattttgtcaattaatgccaatattggccgacatgggtgcgatgttttttaccggaatgaaaaagttcaaaaagcagcaaaacatgatttttggacatattggagtgtattgggtgcgttcgtggcaaaaactcacttcgtgattcgcgcggcgtaattttgtcaattaatgccaatattggccgacatgggtgcgatgttttttaccggaatgaaaaagttcaaaaagcagcaaaacatgatttttggacatattggagtgtattcggtgcgttcgtagcaaaaactcactacgtgattcgcgcggcgaacttttgtcaattaatgccaatattggccgacatgggtacgacgtttatgaccggaagcaaaaagttcaaaaagcaccaaaacatgatttttggacatattggagtgtattgggtgcgttcatggcaaaaacacactacgtgattcgcgcgacgaacttttgtcaattaatgccaacattggccaacatgggtacgacgttaatgaccggaatcaaaaagatcaaaaagcaccaaaagatgatttttggacatattagactatattgggtgcgttcgtggcaaaaactcacttcgtgattcgcgcgacgaacttttgtcaactaacgccaatattgacaattttggaccacacggatgcgatatttttgtccagaatgaaaaagttgaaaaagcaccaaaacatgatttttggacttataggagtgtattgggtgtgttcgtggcaaaaactcacttcgtgattcgcgcgacgaacttttgtcaattaatgccaatattggccgacatgggtgcaatgtttttgaccggaatgaaaattttcaaaaagcagtaaaacatgatttttggacatattggagtgtattgggtgcgttcctcgcaaaaactcacttcgtgattcgcgcggcaaacttttgtcaattaatgccaatattggccgacatgggtacgatgtttttgaccggaatcaaaaagcccaaaaagcaccaaaacatgatttttggacatattagactttattgggtgcgttcgtggcaaaaactcacttcgtgattcgcgcggcgaacttttgtcaactaacgccaatattgtcaattttggaccacacggatgcgatgtttttgtccggaatgaaaaagttgaaaaagcaccaaaacaagatttttggacatattggagtgtattgggtgcgttcgtggcaaaaactcacttcgtgattcgcgcgacgaacttttgtcaattaatgccaatattggccgacatgggtgcaatgtttttgaccagaatgaaaattttcaaaaagcagtaaaacatgatttttggacatattggagtgtattgggtgcgttcctcgcaaaaactcacttcgtgattcgcgcggcgaacttttgtcaattaatgccaatattggccgacatgggtacgatgtttttgaccggaatcaaaaagcccaaaaagcaccaaaacatgatttttggacatattagactttattgggtgcgttcgtggcaaaaactcacttcgtgattcgcgcggcgaacttttgtcaactaacgccaatattgtcaattttggaccacacggatgcgatgtttttgaccggaatgaaaaagttgaaaaagcaccaaaacaatatttttggacttataggagtgtattgggtgcgttcgtggcaaaaactcacttcgtgattcgcgcgacgaacttttgtcaattaatgccaatattggctaacatgggtgcgatgtttttgaccggaatgaaaattttcaaaaagcagtaaaacatgatttttggacatattggagtgtattgggtgcgttcctcgcaaaaactcacttcgtgattcgcgcggcgaacttttgtcaattaatgccaatattggccgacatgggtacgatgtttttgaccggaatcaaaaagcccaaaaagcaccaaaacatgatttttggacatattagactttattgggtgcgttcgtggcaaaaactcacttcgtgattcgcgcggcgaacttttgtcaactaacgccaatattgtcaattttggaccacacggatgcgatgtttttgaccggaatgaaaaagttgaaaaagcaccaaaacaagatttttggacatattggactgtattgggtgcgttcgtggcaaaaactcacttcgtgattcgcgcgacgaacttttgtcaattaatgccaatattggccaacatgggtgcgatgtttttgaccggaatgaaaattttcaaaaagcagcaaaacatgatttttggacatattggagtgtgttgggtgcgttcctggcaaaaactcacttcgtgattcgcggggcgaacttttgtcaattattgacaatataggccgacatgggtacgatgtttttgaccagaatcaaaaagtccaaaaagcaccaaaacatgatttttggacatattagactttattgggttcgttcgtggtaaaaactcacttcgtgattcgcgcggcgaacttttgtcaactaacgccaatattggcaattttggaccacacggatgcgatgtttttgaccggaatgaaaaagttgaaaaagcaccaaaacatgatttttggacatattggactttattgggtgcgttcgtggcaaaaactcacttcgtgattcgcgcggcaaaattttgtcaattaatgccaatattggccgacatgggtgcgatgttttttaccggaatgaaaaagttcaaaaagcagcaaaacatgatttttggacatattggactgtattgggtgcgttcgtggcaaaaactcacttcgtgattcgcgcgacgaacttttgtcaattaatgccaatattggctaacatgggtgcgatgtttttgaccggaatgaaaattttcaaaaagcagcaaaatatgatttttggacatattggagtgtattgggtgcgttcctggcaaaaactcacttcgtgattcgtgtggcgaacctttgtcaattattgcagatattggccgacacgggtgcgatgtttttgaccggaatgaaatagttcaaaaagcaccaaaacatgattttaggacatattggagtgtattgggtgtgttcgtggcaaaaactcacttcgtgattcgtgtggcgatcctttgtcaattattgcagatattggccgacacaggtgcgatgtttttgaccggaatgaaatagttcaaaaaagcaccaaaacatgattttaggacatattggagtgtattgggtgcgttcgtggcaaaaactcacttcgtgattcgcgcggcgaacctttgtcaattattgccaatatagaccgacatgggtacgatgtttttgactggaatcaaaaagtccaaaaagcaccaaaacatgattttaggacatattggagtgtattgggtgcgttcgtggcaaaaactcacttcgtgattcacgcggcgaacttttgtcaattaatgccaatattggccgacatgggtgcgatgtttttgaccggaataaaaaagtttaaaaagcaccaaaacatgattttaggacatattagagtgtattggttgcgttcgtggcaaaatctcacttcgtgattcgcgcggcgaacttttgtcaattaatgccaatattggccgacatgggtgcgatgtatttgaccggaatgaattacttcaaaaaggcaccaaaacatgattttaggacattttggagtgtattgggtgcgttcgaggcaaaaactcacttcgtgattcgcgcggcgaacttttgtcaattaatgccaatattggcccacacgggtgtgatgtttttgaccggaataaaatacatcaaaaaagcaccaaaacatgatttttggacatatcggagtgtattgggtgcgttcgtggcaaaaactcacgcgtgattctcgtggtgaaaatttgtcaattattgccaatattggccgacacgggtgcgatgtttttgaccggaatgaaatagttcaaaaagcaccaaaacatgatttttggacatattggagtgtattggttgcgttcgtggcaaaaactcacttcgtgattcgcgcggcgaacctttctcaattaatgccaatattggcagacacgggtgcgatgtttttgaccggaatgaaatacttcaaaaagcaccaaaacatgatttttggacatattggagtgtattgggtgcgttcgtggcaaaaactcgcttcgtgattcgcgcggcaaaattttgtcaattaatgccaatattggccgacacgggtgcgatatttttgaccggaatgaaatacttcaaaaagcaccaaaacatgatttttggacatattggagtgcattgggtgcgttcgtggcaaaaactcgcttcgtgattcgcgcggcgaaattttgtcaattaatgccaatattggccgacacgggtgcgatatttttcaccggaatgaaatagttcaaaaagcaccaaaacatgatttttggacaaattggagtgtattgggtgcgttcgtggcaaaaactcacttcgtgattcgcgcggcgaaatgttgtcaattaatgccaatattggccgacacgggtgcgatattttttaccggaatgaaaaagttcaaaaagcaccaaaacatgattttaggacatattggagtgtattgggtgcgttcgtggcaaaaactcacttcgtgattcgcgcggcgaacctttctcaataaatgccaatattggtcgactcgggtgcgatgtatttgaccggaatgaaatacttcaaaaaagcaccaaaacatgatttttagacatattggagtgtattgggtgcgttcgtggcaaaaactgacttcgtgatacacgcggcgaacttttgtcaattaatgccaatattagcccatacgggtgcgatgtttttgaccggaatgaaatagttaaaaaagcaccaaaacatgattttaagacatattggagtgtattgggtgcgttcgtggcaaaaactgacttcgtgatacacgcggcgaacttttgtcaattaatgccaatattagcccatacgggtgcgatgtttttgaccggaatgaaatagttcaaaaagcaccaaaacatgatttttggacatattggagtgtattgggtgcgttcgtggcaaaaactcacttcgtgattcgcgcggcgaaattttctcaattaatgccaatattggccgacacgggtgcgatgtttttgaccggaatgaaatacttcaaaaaagcacgaaaacatgattttaggacatattggagtgtattgggtgcgttcgtggcaaaaactcacttcgtgattcgcgcggcgaacttttgtcaattattgccaatataggccgacatgggtacgatgtttttgaccagaatcaaaaagtctaaaaagcaccaaaacatgatttttggacatattagactttattgggtgcgttcgtggcaaaaactcacttcgtgattcgcgcggcgaacttttgtcaattattgcagatattggccgacacgggtgcgatgtttttgaccggaatgaaatagttcagaaagcaccaaaacatgatttttggacatattggagtgtattgggtgcgttcgtggcaaaaactcacttcgtgattcacgcggcgaacctttctcaattaatgccagtattggccgacaagggtgcgatgtttttgaccggaatgaaatatttcaaaaaagcaccaaaacatgattttaggacatattggagtgtattgggtgcgttcgtggcaaaagctcacttcgtgattcgcgcggcgaacttttgtcaattaatgccaattttagcccatacgggtgcgatgtttttgacctgaatgaaaattttcaaaaagcagcaaaacatgagttttggacatattggagtgtgttgggtgcgttcctggcaaaaactcacttcgtgattcgcgcggcgaacttttgtctattattgccaatataggccgacatgggtacgatgtttttgaccagaatcaaaaagtctaaaaagcaccaaaacatgatttttggacatattagactttattgggtgcgttcgtggcaaaaactcacttcgtgattcgcgcggcgaacttttgtcaattattgcagatattggccgacacgggtgcgatgtttttgaccggaatgaaatagttcaaaaagcaccaaaacatgatttttggacatattggagtgtattgggtgcgttcgtggcaaaaactcacttcgtgattcgcgcggcgaacctttctcaattaatgccagtattggccgacaagggtgcgatgtatttgaccggaatgaaatacttcaaaaaagcaccaaaacatgattttaggacatattggagtgtattgggtgcgttcgtggcaaaaactcacttcgtgattcgcgcgacgaacttttgtcaattaatgccaatattggccaacatgggtgcgatgtttttgaccggaatgaaaattttcaaaaagcagcaaaatatgattttttgacatattggagtgtattgggtgcgttcctggcaaaaactcacctcgtgattcgcgcggcgaacttttgtcaattattgacaatataggccgacatgggtacgatgtttttgaccggaatcaaaaagtccaaaaagcaccaaaacatgatttttggacatattagactttattgggtgcgttcgtggcaaaaactcacttcgtgattcgcgcggcgaacttttgtcaactaacgccaatattgtcaattttggaccacacggatgcgatgtttttgaccggaatgaaaaagttgaaaaagcaccaaaacaagatttttggacatattggactgtattgggtgcgttcgtggcaaaaactcacttcgtgattcgcgcgacgaacttttgtcaattaatgccaatattggccaacatgggtgcgatgtttttgaccggaatgaaaattttcaaaaagcagcaaaacatgatttttggacatattggagtgtgttgggtgcgttcctggcaaaaactcacttcgtgattcgcggggtgaacttttgtcaattattgacaatataggccgacatgggtacgatgtttttgaccagaatcaaaaagtccaaaaagcaccaaaacatgatttttggacatattagactttattgggttcgttcgtggtaaaaactcacttcgtgattcgcgctgcgaacttttgtcaactaacgccaatattggcaattttggaccacacggatgcgatgtttttgaccggaatgaaaaagttgaaaaagcaccaaaacatgatttttggacatattggactttattgggtgcgttcgtggcaaaaactcacttcgtgattcgcgcggcaaaattttgtcaattaatgccaatattggccgacatgggtgcgatgttttttaccggaatgaaaaagttcaaaaagcagcaaaacatgatttttggacatattggagtgtattgggtgcgttcgtggcaaaaactcacttcgtgattcgcgcggcgtaattttgtcaattaatgccaatattggctgacatgggtgcgatgttttttaccggaatgaaaaagttcaaaaagcagcaaaacatgatttttggacatattggagtgtattcggtgcgttcgtagcaaaaactcactacgtgattcgcgcggcgaacttttgtcaattaatgccaatattggccgacatgggtacgacgtttatgaccggaagcaaaaagttcaaaaagcaccaaaacatgatttttggacatattggagtgtattgggtgcgttcctggcaaaaactcacttggtgattcgcgcggcgaacttttgtcaattattgacaatataggccgacatgggtacgatgtttttgaccataatcaaaaagtcgaaaaagcaccaaaacatgatttttggacatattagactttattgggtgcgttcgtggtaaaaactcacttcgtgattcgcgcggcgaacttttgtcaactaacgccaatattggcaattttggaccacacggatgcgatgtttttgaccgcaatgaaaaatttgaaaaagcaccaaaacatgatttttggacatattggactttattgggtgcgttcgtggcaaaaactcacttcgtgattcgcgcgacgaacttttgtcaattaatgccaatattggccgacatgggtgcgatgtttttgaccggaatgaaaattttcaaaaagcagcaaaacatgatttttggacaaattggagtgtattgggtgcgttcctagcaaaaactcacttcgtaattcgcgcggagtactgttgtcaattattgccaatataggccgacatgggtacgatgtttttgaccagaatcaaaaagtccaaaaagcaccaaaacatgatttttggacatattagactttattgggtgcgttcgtggtaaaaactcacttcgtgattcgcgcggcgaacttttgtcaactaacgccaatattggcaattttggaccacacggatgcgatgtttttgaccggaatgaaaaagttgaaaaagcaccaaaacatgatttttggacatattggactttattgggtgcgttcgtggcaaaaactcacttcgtgattcgcgcggcgaaattttgtcaattaatgccaatattggccgacatgggtgcgatgttttttaccggaatgaaaaagttcaaaaagcagcaaaacatgatttttggacatattggagtgtattcggtgcgttcgtagcaaaaactcactacgtgattcgcgcggcgaacttttgtcaattattgacaatattggccgacatgggtgcgatgtttttgaccggaatgaaaattttcaaaaagcagcaaaacatgatttttggacaaattggagtgtattgggtgcgttcgtggcaaaaactcacttcgtgattcgcgcggcgaacttttgtcaactaacgccaatattggcaattttggaccacacggatgcgatgtttttgaccggaatgaaaaagttgaaaaagcaccaaaccattatttttggacatattggactttattgggtgcgttcgtggcaaaaactcacttcgtgattcgcgcggcgaacctttgtcaattattgccaatataggccgacatgggtacgaatgtttttgaccggaatcaaaaagtccaaaaagcaccaaaacatgatttttggacatattggagttattgggtgcgttcgtggcaaaaactcacttcgtgattcgcgcggcgaacttttctcaattaatgccaatattggccgacacgggtgcgatgtttttgaccggaatgaaatacttcaaaaaggcacaaaaacatgattttaggacatattggagtgtattgggtgcgttcgtggcaaaaactcgcttcatgattcgcttggcgaacttttgtcaattaatgccaatattggcatatttttgcccaaacaggtgcgatgtttttgaccggaatgaaaatgttcaaaaatcaccaaaacatgatttttggacatattggagtgtattgggtgcgttcgtggcaaaaactcgcttcatgattcgctcggcgaacttttgtcaattaatgccaatattggcatatttttgcccaaacgggtgcgatgattttgaccggaattaaaatgttcaaaaatcaccaaaacatgatttttggacatattggagtgtattgggtgcgttcgtggcaaacactcgcttcatgattcgctcggcgaacttttgtcaattaatgcaaatattggccgacaagggtgcgatgtttttgaccggaatgaaatagttcaaaaagcaccaaaacatgattttaggacatattggagtgtattggttgcgttcgtggcaaaaactcacttcgtgatacacgcggcgaacttttgtcaattaatgccaatattggcatatttttgcccaaacaggtgcgatgtttttgaccggaatgaaaatgttcaaaaatcaccaaaacatgatttttggacatattggagtgtattgggtgcgttcgtggcaaacactcgcttcatgattcgctcggcgaacttttggctattaatgcaaatattggccgacacgggtgcgatgtttttgaccggaatgaaatagttcaaaaagcaccaaaacatgattttaggacatattggagtgtattgggtgcgttcgtggcaaaaactcacttcgtnnnnnnnnnnnnnnnnnnnnnnnnnnnnnnnnnnnnnnnnnnnnnnnnnnnnnnnnnnnnnnnnnnnnnnnnnnnnnnnnnnnnnnnnnnnnnnnnnnnnnnnnnnnnnnnnnnnnnnnnnnnnnnnnnnnnnnnnnnnnnnnnnnnnnnnnnnnnnnnnnnnnnnnnnnnnnnnnnnnnnnnnnnnnnnnnnnnnnnnnnnnnnnnnnnnnnnnnnnnnnnnnnnnnnnnnnnnnnnnnnnnnnnnnnnnnnnnnnnnnnnnnnnnnnnnnnnnnnnnnnnnnnnnnnnnnnnnnnnnnnnnnnnnnnnnnnnnnnnnnnnnnnnnnnnnnnnnnnnnnnnnnnnnnnnnnnnnnnnnnnnnnnnnnnnnnnnnnnnnnnnnnnnnnnnnnnnnnnnnnnnnnnnnnnnnnnnnnnnnnnnnnnnnnnnnnnnnnnnnnnnnnnnnnnnnnnnnnnnnnnnnnnnnnnnnnnnnnnnnnnnnnnnnnnnnnnnnnnnnnnnnnnnnnnnnnnnnnnnnnnnnnnnnnnnnnnnnnnnnnnnnnnnnnnnnnnnnnnnnnnnnnnnnnnnnnnnnnnnnnnnnnnnnnnnnnnnnnnnnnnnnnnnnnnnnnnnnnnnnnnnnnnnnnnnnnnnnnnnnnnnnnnnnnnnnnnnnnnnnnnnnnnnnnnnnnnnnnnnnnnnnnnnnnnnnnnnnnnnnnnnnnnnnnnnnnnnnnnnnnnnnnnnnnnnnnnnnnnnnnnnnnnnnnnnnnnnnnnnnnnnnnnnnnnnnnnnnnnnnnnnnnnnnnnnnnnnnnnnnnnnnnnnnnnnnnnnnnnnnnnnnnnnnnnnnnnnnnnnnnnnnnnnnnnnnnnnnnnnnnnnnnnnnnnnnnnnnnnnnnnnnnnnnnnnnnnnnnnnnnnnnnnnnnnnnnnnnnnnnnnnnnnnnnnnnnnnnnnnnnnnnnnnnnnnnnnnnnnnnnnnnnnnnnnnnnnnnnnnnnnnnnnnnnnnnnnnnnnnnngcacccgagtgggccagtattggcattaattgacaaaagttcgccgcgcgaatcacgaggtgagtttttgccacgaacgcaaccaatacactcaattatgtcctaaaatcatgttttggtgagtttttgaactattttattccggtcaaaaacatcggacccgtttggccaatactggcattaattgacaaaactttcccgcgcgaatcaagaagtgagttttagccacgaacgtaccgaatacactccaatatgtcaaaaaatcatgctttggtgcttttttgaactttttcattacggacaaaaacatcgcacccgtgtgggccaatattggcattaattgacaaaagttcgccgcgcgaatcacgaggtgagtttttgccacgaacgcaaccaatacactcaattatgtcctaaaatcatgttttggtgagtttttgaactattttattccggtcaaaaacatcgcacccgtttgcgcaaaaatatgctaatattggcattaattgacaaaagttagccgagcgaatcatgaagtgagtttttgccacgaacgcacccaatacactccaatatgtccaaaaatcatgttttcgtgatttttgaacattttcataccggtcaaaaacatcggacccgtttgggcaaaaatatgccaatattggcattaatttacaaaagttcgccgcgagaatcacgaagtgagtttttgccacgaacgcacccaatatactcaaatatgtctaaaaatcatgtttttgtgctttttgaactttttcaatccggtcaaaaacatcgcacccgtgtgggcactattgggattaatttacaaaagttcgccaaaacccgtgcgagtttttgaactatttcattacggccccaaacatcgcacccgtgtcggccaatattggcattaactgacaaaagatcgccgcgcgaatcacgaaaagagtttttgccatgagtgcaccctttaaactcctatatgtcctataatcatgttttggcgcttatttgaagtatttcattccggcccaaaacatcgcacccgtgtgggccaatattggcaataactgactaaagttcgccgcgagaatcacaaaatgagtttttgcgacgatcgcacccgatacactccaatatgtctataaaccatgttttggggcttttggagatttttcaatcaggccacaaaaaccccccccagggggcgcaaatgggtgtattagggataaaagcctccgcagacaaccaaaaagagttttgtccctgaggcccctatgatatataannnnnnnnnnnnnnnnnnnnnnnnnnnnnnnnnnnnnnnnnnnnnnnnnnnnnnnnnnnnnnnnnnnnnnnnnnnnnnnnnnnnnnnnnnnnnnnnnnnnttttagtgctttttgaacattatcattccagtcaaaaacatcgcacccgtgtgggccaatattggcatgaattgacaaaagttcgccgcgcgaatcacgaaacgagtttttgccacgaacggacccaatacactccaatatgtccaaaaatcatgttttggagattttttaactttttcattccggtcaaaaacatcgcacccgactcggccaatatatgccaatattggcattaattgacaacagttcgccgcgcgaatcacgaagtgagtttttgcaatgaacgcaccccatataatcaaatatgtccaaaaatcatgttttggtgctttttgaactttttcattccggccaaaaacatcgcacccgtgtgggccaatattggcatttattgacaaaagttcgccgcgtgtatcacgaagtcagtttttgccaagaacgcacccaatacactccaatatgtccaaaaatcatgttttagtgctttttgaacattatcattccagtcaaaaacatcgcacccgtgtgggccaatattggcatgaattgacaaatgttcgccgcgcgaatcacgcaatgagtttttgccacgaacgcacccaatatactccaatatgtccaaaaatcatgtttttgtgccttttcaactttttcattccggtcaaaaacatcgcacccgtgtgggccaatatatgccaaaattagcattaattgacaaaaggtcgccgagcgaatcacgaagtgagtttttgtcacgaacgcacccaatacactccaatatgtccaaaaatcatgttttggtgctttttgaacattttaagtccagtcaacaacctcgcacccgtgtgggccaatattggcattaattgacaaaagttcaccgcgcgaatcacgaaatgagtttttgccacgaaggcacccaatacactccaatatgtccaaaaatcatggtttggagattttttaactttttcattccggtcaacaacatcgcacccgactcggccaatatatgccaatattggcattaattgacaaaagttcgccgcgcgaatcacgaagtgagtttttgcaatgaacgcaccgcatataatccaatatttccaaaaatcatgttttggtgctttttgaactttttcattccggccaagaacatcgcacccgtgtgagccaatatatgccaatattggcattagttaagaaatgttcgctgcgcgaatcacgatgtgagtttttgccatgaacgcacccaatacactccaatatgtccaaaaatcatgttttggtgctttttgaactttttcattccggtcaaaaacatcgcacccgtgacggccaatattggcattaactgacaaaagttcgtcgcgtgtattacgaagtcagtttttgtcacgaacgcacccaatacactccaatatgtccaaaaatcatgttttggtgatttttgaactttttcattccggtcaaaaacatcgcacccgagtcggccaatatatgccaatattggcattaattgacaaaagttcgccgcgaatcacgaagtgagtttttgccacgaacgcatcgaatacactctaatatgtccaaaaatcctgttttggtgctttttgaagtttttcattccggccaagaacatcgcacccgtgtgagccaatatatgccaatattggcattagtttagaaatgttcgccgcgcgaatcacaaagtgagtttttgccacgaacgcacccaatacactctaatatgtccaaaaatcatgttttggtgctttttgaacattttcattccggtcaaaaacatcgcacccgtgtcggccagtattggcattaactgacaaaagttcgccgcgtgtatcacgaagtcagttttggccacgaacgcacccaatatactccaatatatccaaaaatcatgttttggtgctttttgaactctttcattccggtcaaaaacatcgcacccgtgtgggccaaaatatgccaaaattagcattaattgacaaaaggtcgccgagcgaatcacgaagtgagtttttgtcacgaacgcacccaataaactccaatatgtccaaaaatcatgttttggtgattttagaactttttcattccggtcaaaaacatcacagctgagtcggccaatatatgccaatattgggattaattgacaaaagttcgtcgcgaatcacgaggtgagtttttgccacgaacgcatccaatacactctaatatgtccaaaaatcatgttttggtgctttttaaagtttttcattccggccaagaacatcgcacccgtgtgagccaatatatgccaatattggcactagttaagaaatgttcgctgcgctaatcacaaagtgagtttttgccacgaacgcacccaatacactccaatttgtccaaaaatcatattttggtgatttttgaactttttcattccggtcaaaaacatcgcagccgagtcggccaatatatgccaatattggcattaattgacaaaagttcgtcgcgaatcacgaggtgagtttttgccacgaacgcatccaatacactctaatatgtccaaaaatcatgttttggtgctttttaaactttttcattccggccaagagcatcgcacccgtgtgagccaatatatgccaatattggcactagttaagaaatgttcgccgcgctaatcacaaagtgagtttttgccacgaacgcacccaatacactccaatttgtccaaaaatcatgttttggtgattttttaactttttcattccggtcaaaaacatcgcagccgagtcggccaatatatgccaatattggcattaattgacaaaagttcgtcgcgaattacgaagtgagtttttgccacgaacggacccaatacactctaatatgtccaaaaatcatgttttggtgctttttgaactttttcattccggtcaaaaacatcgcacccgtgtcggccaatattggcattaattgacaaaagttcaccgcgtgtatcacgaactcagttttttccacgaacgcaccgaatagactccaatatgtccaaaaatcatgttttggttctttttgaactttttcattcaggtcaaaaacatcgcacccgtgtgggccaaaatatgccaaaattagcattaattgacaaaaggtcgctgcgcgaatcacgaagtgtgtttttgccacgaacggacacaatacactcaaatatgtccaaaaatcatgttttggtgatttttgaactttttcattccggtcaaaaacatcgcacccgagtcagccaatatatgccaatattggtattaattgacaaaagttcgccgcgaatcacgaagtgagtttttgccacgaacgcatccaatacactctaatatgtccaaaaatcatgttttggtgctttttgaagttcttcattccggccaaaaacatcgcatccgtgtcggctaatattggcattaattgacaaaagttcgccgcgtgtatcacgaagtgagtttttgccacgaacgcacccaatacactccaatatgtcctaaaatcatgttttggtgatttttgaactttttctttccggtcaaaaacatcgcacccgagtcggccaatatatgccaatattggcattaattgacaaaagttcgccgcgcgaatcacgaagtgagtttttgccatgaacacatccaatacactccaatatgtccaaaaatcatgttttcgtgctttctcaactttttcattccggtcaaaaacatcgcacccgtgtgggccaatattagcattaattgacataagttcgccgcgcgaattacgaagtgagtttttgccacgaacggatccaatacactctaatatgtccaaaaatcatgttttggtgctttttgaactttttcattccggtcaaaaacatcgcacccgtgtcggccaatattggcattaattgacaaaagttcgccgcgtgtatcacgaactcagttttttccacgaacgcaccgaatagactccaatatgtccaaaaatcatgttttggtgctttttgaactttttcattcaggtcaaaaacatcgcacccgtgtgggccaaaatatgccaaaattagcattaattgacaaaaggtcgctgcgcgaataccgaagtgagtttttgcctcgaacgcacccaatacactccaatatgtccaaaaatcatgttttggtgctttttgaactttttcattccggtcaaaaacatcgcacccgtgtgggccaatattggcattaattgacaaaagttcgccgcgtgtatcccgaagtcagtttttgccatgaacgcacccaatacactccaatatgtccaaaaatcatgttttggtgctttttgaacattttctttccggtcaaaaacatcgcacccgtgtgggccaataatggcattaattgacaaaagttcgccgcgcgaatcacgaagtgagtttttgccatgaacacatccaatacactccaatatgtccaaaaaccatgttttcgtgctttttcaactttttcattccggtcaaaaacatcgcacccgtgtgggccaatattagcattaattgacaaaagttcgccgcacgaatcacgaagtgagtttttgccacgaacgcatccaatacactctaatatgtccaaaaatcatgttttggtgctttttgaagttcttcattccggccaagaacatcgcacccgtgtcggccaatattggcattaattgacaaaagttcgccgcgtgtatcccgaagtcagtttttgccatgaacgcacccaatacactccaatatgtccaaaaatcatgttttggtgctttttgaacattttctttccggtcaaaaacatcgcacccgtgtgggccaataatggcattaattgacaaaagttcgccgcgcgaatcacgaagtgagtttttgccatgaacacatccaatacactccaatatgtccaaaaaccatgttttcgtgctttttcaactttttcattccggtcaaaaacatcgcacccgtgtgggccaatattagcattaattgacaaaagttcgccgcacgaatcacgaagtgagtttttgccacgaacgcatccaatacactctaatatgtccaaaaatcatgttttaatgctttttgaagttcttcattccggccaagaacatcgcacccgtgtcggccaatattggcattaattgacaaaagttcgccgcgtgtatcacgaagtgaatttttgccacgaacgcacccaatacactccaatatgtcctaaaatcatgttttggtgatttttgaactttttctttccggtcaaaaacatcgcacccgagtcggccaatatgtgccaatattggcattaattgacaaaagttcgcggcgcgaatcacgaagtgagtttttgccatgaacacatccaatacactccaatatgtccaaaaatcatgttttcgtgctttttcaactttttcattccggtcaaaaacatcgcacccgtgtgggccaatattagcattaattgacaaaagttcgccgcgcgaatcacgaagtgagtttttgtcaagaacgcacccaatacactccaatatgtccaaaaatcatgttttggtgctttttgaacattttaagtccagtcaaaaacctcgcacccgtgtgggccaatattggcattaattgacaaaagttcgccgcgcgaatcacgaaacgagtttttgccacgaacggacccaatacactccaatatgtccaaaaatcatgttttggagattttttaactttttcattccggtcaaaaacatcgcacccgactcggccaatatatgccaatattggcattaattgacaacagttcgccgcgcgaatcacgaagtgagtttttgcaatgaacgcaccccatataatcaaatatgtccaaaaatcatgttttggtgctttttgaactttttcattccggccaaaaacatcgcacccgtgtgggccaatattggcatttattgacaaaagttcgccgcgtgtatcacgaagtcagtttttgccaagaacgcacccaatacactccaatatgtccaaaaatcatgttttagtgctttttgaacattatcattccggtcaaaaacatcgcacccgtgtgggccaatattggcatgaattgacaaatgttcgacgcgcgaatcacgcaatgagtttttgccacgaacgcacccaatatactccaatatgtccaaaaatcatgtttttgtgccttttcaactttttcattccggtcaaaaacatcgcacccgtgtgggccaatatatgccaaaattagcattaattgacaaaaggtcgccgagcgaatcacgaagtgagtttttgtcacgaacgcacccaatacactccaatatgtccaaaaatcatgttttggtgctttttgaacattttaagtccagtcaacaacctcgcacccgtgtgggccaatattggcattaattgacaaaagttcaccgcgcgaatcacgaaatgagtttttgccacgaacgcacccaatacactccaatatgtccaaaaatcatgttttggtgctttttgaactttttcattccggtcaaaaacatcgcacccgtgacggccaatattggcattaactgacaaaagttcgtcgcgtgtattacgaagtcagtttttgtcacgaacgcacccaatacactccaatatgtccaaaaatcatgttttggtgatttttgaactttttcattccggtcaaaaacatcgcacccgagtcggccaatatatgccaatattggcattaattgacaaaagttcgccgcgaatcacgaagtgagtttttgccacgaacgcatcgaatacactctaatatgtccaaaaatcctgttttggtgctttttgaagtttttcattccggccaagaacatcgcacccgtgtgagccaatatatgccaatattggcattagtttagaaatgttcgccgcgcgaatcacaaagtgagtttttgccacgaacgcacccaatacactctaatatgtccaaaaatcatgttttggtgctttttgaagtttttcattccggccaagaacatcgcacccgtgtgagccaatatatgccaatactgccattagtggagaaatgttcgccgcgcaaatcacgaacatcgcacccggaatatatggtagtcaatatgtcaattaattgacatatttttcaactttttcattccggtcaaaaacatcgcacccgtgtgggccaatattggcattagttgagaaatgttcgccgtgaatcacgttgtgatgttttgccacgaacgcacccaatacactccaatatgtccaaaaatcatgttttggtgctttttgaactttttcattccggtcaaaaacatcgcacccgtgtgggccaacatatgcaaaaattagcattaattgacaaaaggtcgccgcacgaattacgaagtgagtttttgtctcgaacgcacccaatacactccaatatgtcccaaaatcatgtttttgtgctttttgaagtttttcattctggccaagatatgagccaatatatggcaatattggcattagttgagaaatgttcgccgcgcgaatcacaaagtgagtttttgccacgaacgcacccaatacactccaatatgtccaaaaatcatgtattggtgttttttgaacattttcattccggtcaaaaacatcgcacccgtttgggcccaaatatgcataaattagcattacttgactaaaggtcgccgcgcgaatcccgaagtgagtttttgcctcgaacgcacccaatacattccaatatgtccaaaaatcatattttggtgctttttgaactttttcatttcggtcaaaaacatcgcacccgtttgggccaaaatatgcataaattagcattacttgacaaaaggtcgccgcgcgaatcccgaagtgagtttttgcctcgaacgcacccaatacactccaatatgtccaaaaatcatattttggtgctttttgaactttttcattcctgtcaaaaacatcgcacccgtgtgggccaatattggcattaattgacaaatgttcgccgcgcgaatcacgcagtgtgtttttgccacgaacgcacccaatatactccaatatgtccaaaaatcatgttttggtgatttttgaactttttctttccggtcaaaaacgtcgcgcacgagtcggccaatatatgccaatattggcattaattgacaaaagttcgccgcgagaatcacgaagtgagtttttgccatgaacacatccaatacactccaatatgtccaaaaaccatgttttcgtgctttttcaactttttcattccggtcaaaaacatcgcacccgtgtgggccaatattagcattaattgacaaaagttcgccgcgcgaatcacgaagtgagtttttgccacgaacgcatccaatacactctaatatgtccaaaaatcatgttttggtgcttttcaaagtttttcattctggcgaagaacatagcacccgtgtgagccaatttatgccaatattggcattagttgagaaatgttcgccgcgaatcacaaagcgagtttttgccacgaacgcacccaatacactccaatatgtccaaaaatcatgttttggtaatttttgaactttttcattccggtcaaaaagatcgcacccgtgtcggccaatattggcattaattgacaaaagttcgccgcgtgtatcacgaactcagttttttccacgaacgcacccaataaactccaatatgtccaaaaatcatgttttggtgctttttgaactttttcattccggtcaaaaacatcgcacccgtttgggccaaaatatgcataaattagcattacttgacaaaaggtcgccgcgcgaatcccgaagtgagtttttgcctcgaacgcacccaatacattccaatatgtccaaaaatcatatattggtgctttttgaactttttcatttcggtcaaaaacatcgcacccgtttgggccaaaatatgcataaattagcattacttgacaaaaggtcgccgcacgaatcccgaagtgagtttttgcctcgaacgcacccaatacactctaatgtgtccaaaaatcatgttttggtgcttttcaaagtttttcattctggcgaagaacatagcacccgtgtgagccaatttatgccaatattggcattagttgagaaatgttcgccgcgaatcacaaagcgagtttttgccacgaacgcacccaatacactccaatatgttcaaaaatcatgttttggtaatttttgaactttttcattccggtcaaaaagatcgcacccgtgtcggccaatattggcattaattgacaaaagttcgccgcgtgtatcacgaactcagttttttccacgaacacacccaatatatggcaatattggcattagttgagaaatgttcgccgcgcgaatcacaaagtgagtttttgccacgaacgcacccaatacactccaatatgtccaaaaatcatgtattggtgttttttgaacattttcagtccagtcaaaaacatcgcacccgtgtgggccaatattggcattaattgacaaaagttcgctgcgcgaatcacgaagtgagtttttgccacgaacgcatccaatacactctaatatgtccaaaaatcatgttttggtgcttttcgaagtttttcattctggcgaagaacatagcacccgtgtgagccaatttatgccaatattggcattagttgagaaatgttcgctgcgaatcacgaagcgagttttttctacgaacgcacccaatacactccaatatgtccaaaaatcatgttttggagctttttgaactttttcattccggtcaaaaacatcgcacccgtgtcggccaatattggcattagttgacaaaagttcgccgcgtgtatcacgaagtgagtttttgtcacgaacgcacccaatacactccaatatgtccaaaaatcatgttttggtgctttttgaacattttaagtccagtcaaaaacctcgcacccgtgtgggccaatattggcattaattgacaaaagtttgccttgtgtatgacgaagtgtgtttttgccatgaacacatccaatacactccaatatgtccaaaaatcatgttttcgtgctttttcaactttttcattccggtcaaaaacatcgcacccgtgtgggccaatattagcattaattgacaaatgttcgccgcgcgaatcacgcagtgtgtttttgccacgaacgcacccaatatactccaatatgtccaaaaatcatgtttttgtgatttttgaactttttctttccggtcaaaaacgtcgcgcacgagtcggccaatatatgccaatattggcattaattgacaaaagttcgccgcgcgaatcacgaagtgtgtttttgccatgaacacatccaatacactccaatatgtccaaaaatcatgttttcgtgctttttcaactttttcattccggtcaaaaacatcgcacccgtgtgggccaatattagcattaattgacaaatgttcgccgcgcgaatcacacagtgtgtttttgccacgaacgcacccaatatactccaatatgtccaaaaatcatgttttggtgatttttgaactttttctttccggtcaaaaacgtcgcgcacgagtcggccaatatatgccaatattggcattaattgacaaaagttcgccgcgcgaatcacgaagtgtgtttttgccatgaacacatccaatacactccaatatgtccaaaaatcatgttttcgtgctttttcaactttttcattccggtcaaaaacatcgcacccgtgtgggccaatattagcattaattgacaaaagttcgccgcgcgaatcacgaagtgagtttttgccacgaacacatccaatacactctaatatgtccaaaaatcatgttttggtgctttttgaagtttttcattccggccaagaacatcgcacccgtgtgagccaatatatgccaatactgccattagtggagaaatgttcgccgcgcaaatcacgaacatcgcacccggaatatatggtagtcaatatgtcaattaattgacatatttttcaactttttcattccggtcaaaaacatcgcacccgtgtgggccaatattggcattagttgagaaatgttcgccgtgaatcacgtagtgatgttttgccacgaacgcacccaatacactccaatatgtccaaaaatcatgttttggtgctttttgaactttttcattccggtcaaaaacatcgcacccgtgtgggccaacatatgcaaaaattagcattaattgacaaaaggtcgccgcacgaattacgaagtgagtttttgtctcgaacgcacccaatacactccaatatgtcccaaaatcatgtttttgtgctttttgaagtttttcattctggccaagatatgagccaatatatggcaatattggcattagttgagaaatgttcgccgcgcgaatcacaaagtgagtttttgccacgaacgcacccaatacactccaatatgtccaaaaatcatgtattggtgttttttgaacattttcagtccagtcaaaaacatcgcacccgtgtgggccaatattggcattaattgacaaaagttcgctgcgcgaatcacgaagtgagtttttgccacgaacgcatccaatagactctaatatgtccaaaaatcatgttttggtgcttttcgaagtttttcattctggcgaagaacatagcacccgtgtgagccaatttatgccaatattggcattagttgagaaatgttcgctgcgaatcacgaagcgagtttttgcaacgaacgcacccaatacactccaatatgtccaaaaatcatgttttggagctttttgaactttttcattccggtcaaaaacatcgcacccgtgtcggccaatattggcattagttgacaaaagttcgccgcgtgtatcacgaagtgagtttttgtcacgaacgcacccaatacactccaatatgtccaaaaatcatgttttggtgctttttgaacattttaagtccagtcaaaaacctcgcacccgtgtgggccaatattggcattaattgacaaaaattcgccgcgtgtatcacgaagtgagtttttgccacgaacgcacccaatacactccaatatgtccaaaaatcatgttttggtgatttttgaactttttcattccggtcaaaaacatcgcacccgtgtgggccaatattggcattaattgacaaaagttcgccgcgtgtatcacgaagtgagtttttgccacgaacgcacccaatacactccaatatgttcgaaaatcatgttttggagctttttgaactatttcattcgggtcaaaaagatcgcacccgagtgggccagtattggcattaattgacaaaagttcgccgcgcgaatcacgaggtgagtttttgccacgaacgcaaccaatacactcaattatgtcctaaaatcatgttttggtgagtttttgaactattttattccggtcaaaaacatcgcacccgtttgcgcaaaaatatgctaatattggcattaattgacaaaagttagccgagcgaatcatgaagcgagattttgccacgaacgcacccaatacactccaatatgtccaaaaatcatgttttggtgatttttgaacattttcataccggtcaaaaacatcggacccgtttgggcaaaaatatgccaatattggcattaatttacaaaagttcgccgcgagaatcacgaagtgagtttttgccacgaacgcacccaatatactcaaatatgtctaaaaatcatgtttttgtgctttttgaactttttcaatccggtcaaaaacatcgcacccgtgtgggcactattggcattaatttacaaaagttcgccaaaacccgtgtgagtttttgaactatttcattccggtcaaaaacatcgcacccgtgtcggccaatattggcattaactgacaaaagttcgccgcgcgaatcacgaagtgagtttttgccatgaatgcacccaataaactccaatatgtcctaaaatcatgttttggtgcttatttgaagtatttcattccggtcaaaaacatcgcacccgtgtgggccaatattggcaataactgacaaaagttcgccgcgagaatcacgaagtgagtttttgcgacgatcgcacccaatatactcaaatatgtctaaaaatcatgtttttttgctttttgaactttttcaatccagtcaaaaacatcgcacccgtgtgggcactattggcattaatttacaaaagttcgccgcgagaatcacgaagtgagtttttgccacgaacgcacccagcaaactccaatatgtcctaaaatcatgttttggtgagtttttgaactatttcattccggtcaaaaacatcgcacccgtgtcggccaatattggcattaatagacaaaagttcgtcgcccgaatcacgaagtgagtttttgccacgaatgcacccaataaactccaatatgtcctaaaatcatgttttagtgcttttttgaagtatttcattccggtcaaaaacatcgcacccgtgtgggccaatattggcattaactaacaaaagttcaccgcgagaatcacgaagtgagtttttgcgacgatcgcacccaatatactcaaatatgtctaaaaatcatgtttttgtgctttttgaactttttcaatccagtcaaaaacatcgcacccgtgtcggccaatattggcattaattgacaaaagttcgccacgtgtatcacgaagtgagtttgtgccatgaacgcacccaatacactccaatatgtccaaaaatcatgtttttatgatttttgaactttttcattccggtcaaaaacatcggacccgtttgggaaaaaatatgccaatattggcattaatttacaaaagttcgccgcgagaatcacgaagtgagtttttgccacgaatgcacccaataaactccaatatgtcctaaaatcatgttttggtgcttttttgaagtatttcattccggtcaaaaacatcgcacccgtgtgggccaatattggcattagctaacaaaagttcgccgcgagaatcacgaagtgagtttttgcgacgatcgcacccaatatactcaaatatgtctaaaaatcatgtttttgtgctttttgaactttttcaatccagtcaaaaacatcgcacccgtgtcggccaatattggcattaattgacaaaagttcgccacgtgtatcacgaagtgagtttttgccacgaacgcacccaatacactccaatatgtccaaaaatcatgtttttgtgatttttgaactttttcattccggtcaaaaacatcggacccgtttgggcaaaaatatgccaatattggcattaatttacaaaagttcgccgcgagaatcacgaagtgagtttttgccacgaacgcacccagtaaactccaatatgtcctaaaatcatgttttggtgagtttttgaactatttcattccggtcaaaaacatcgcacccgtgtcggccaatattggcattaattgacaaaagttcgtcacgcgaatcacgaagtgagtttttgccacgaatgcacccaataaactccaatatgtcctaaaatcatgttttggtgcttttttgaagtatttcattccagtcaaaaacattgcacccgtgtgggccaatattggcattaattgacaaaagttcgccgcgtgtatcacgaagtgagtttttgccacgaacgcaccgaatacactccaatatgtccaaaaatcattttttggtgcttttttgaactttttcattaaggtcaaaaacatcgcacccgtgtgggctaatattggcattaattgacaaaagttcgccgggcgaatcacgaagtgagttttagccacaaacggtgcgaatacactccaatatgtccaaaaatcattttttggtgcttttttgaactttttcattaaggtcaaaaacatggcacccgtgtcggccaatattggcattaattgacaaaacttccccgcgcgaatcaagaagtgagttttagcctcgaacggaccgaatacactccaatatgtccaaaaatcatgctttggtgcttttttgaactttttcattacggacaaaaacatcgcacccgtgtgggccaatattggcattaattgacaaaaattcgccgcgtgtatcacgaagtgagtttttgccacgaacgcacccaatacactccaatatgtccaaaaatcatgttttggtgatttttgaactttttcattccggtcaaaaacatcgcacccgtgtgggccaatattggcattaattgacaaaagttcgccgcgtgtatcacgaagtgagtttttgccacgaacgcacccaatacactccaatatgttcgaaaatcatgttttggagctttttgaactatttcattccggtcaaaaagatcgcacccgagtgggccagcattggcattaattgacaaaagttcgccgcgtgaatcacgaggtgagtttttgctacgaacgcaaccaatacactcaattttgtcctaaaatcatgttttggtgagtttttgaactattttattccggtcaaaaacatcgcacccgtttggccaatattggcattaattgacaaaacttcctcgcgcgaatcaagaagtgagttttagccacgaacgtaccgaatacactgcaatatgtccaaaaatcatgctttggtgctttttttaactttttcattacggacaaaaacatcgcacccgtgtgggccaatattggcattaattgacaaaagttcgccgcgtgtatcacgaagtgagtttttgccacgaacgcacccaatacactccaatatgttcgaaaatcatgttttggagctttttgaactatttcattccggtcaaaaagatcgcacccgagtgggccagtattggcattaattgacaaaagttcgccgcgcgaatcacgaggtgagtttttgccacgaacgcaaccaatacactcaattatgtcctaaaatcatgttttggtgagtttttgaactattttattccggtcaaaaacatcggaccagtttggccaatactggcattaattgacaaaactttcccgcgcgaatcaagaagtgagttttagccacgaacgtaccgaatacactccaatatgtcaaaaaatcatgctttggtgcttttttgaactttttcattacggacaaaaacatcgcacccgtgtgggccaatattggcattaattgacaaaagttcgccgcgcgaatcacgaggtgagtttttgccacgaacgcaaccaatacactcaattatgtcctaaaatcatgttttggtgagtttttgaactattttattccggtcaaaaacatcgcacccgtttgcgcaaaaatatgctaatattggcattaattgacaaaagttagccgagcgaatcatgaagtgagtttttgccacgaacgcacccaatacactccaatatgtccaaaaatcatgttttggtgatttttgaacattttcataccggtcaaaaacatcggacccgtttgggcaaaaatatgccaatattggcattaatttacaaaagttcgccgcgagaatcacgaagtgagtttttgccacgaacgcacccaatatactcaaatatgtctaaaaatcatgtttttgtgctttttgaactttttcaatccggtcaaaaacatcgcacccgtgtgggcactattggcattaatttacaaaagttcgccaaaacccgtgtgagtttttgaactatttcattccggtcaaaaacatcgcacccgtgtcggccaatattggcattaactgacaaaagttcgccgcgcgaatcacgaagtgagtttttgccatgaatgcacccaataaactccaatatgtcctaaaatcatgttttggtgcttatttgaagtatttcattccggtcaaaaacatcgcacccgtgtgggccaatattggcaataactgacaaaagttcgccgcgagaatcacgaagtgagtttttgcgacgatcgcacccaatatactcaaatatgtctaaaaatcattttttttgctttttgaactttttcaatccagtcaaaaacatcgcacccgtgtgagcactattggcattaatttacaaaagttcgccgcgagaatcacgaagtgagtttttgccacgaacgcacccagtaaactccaatatgtcctaaaatcatgttttggtgagtttttgaactatttcattccggtcaaaaacatcgcacccgtgtcggccaatattggcattaattgacaaaagttcgtcgcccgaatcacgaagtgagtttttgccacgaatgcacccaataaactccaatatgtcctaaaatcatgttttagtgcttttttgaagtatttcattccggtcaaaaacatcgcacccgtgtgggccaatattggcattaactaacaaaagttcaccgcgagaatcacgaagtgagtttttgcgatgatcgcacccaatatactcaaatatgtctaaaaatcatgtttttgtgctttttgaactttttcaatccagtcaaaaacatcgcacccgtgtcggccaatattggcattaattgacaaaagttcgccacgtgtatcacgaagtgagtttgtgccatgaacgcacccaatacactccaatatgtccaaaaatcatgtttttatgatttttgaactttttcattccggtcaaaaacatcggactcgtttgggcaaaaatatgccaatattggcattaatttacaaaagttcgccgcgagaatcacgaagtgagtttttgccacgaatgcacccaataaactccaatatgtcctaaaatcatgttttggtgcttttttgaagtatttcattccggtcaaaaacatcgcacccgtgtgggccaatattggcattagctaacaaaagttcgccgcgagaatcacgaagtgagtttttgcgacgatcgcacccaatatactcaaatatgtctaaaaatcatgtttttgtgctttttgaactttttcaatccagtcaaaaacatcgcacccgtgtcggccaatattggcattaattgacaaaagttcgccacgtgtatcacgaagtgagtttttgccacgaacgcacccaatacactccaatatgtccaaaaatcatgtttttgtgatttttgaactttttcattccggtcaaaaacatcggacccgtttgggcaaaaatatgccaatattggcattaatttacaaaagttcgccgcgagaatcacgaagtgagtttttgccacgaacgcacccagtaaactccaatatgtcctaaaatcatgttttggtgagtttttgaactatttcattccggtcaaaaacatcgcacccgtgtcggccaatattggcattaattgacaaaagttcgtcgcgcgaatcacgaagtgagtttttgccacgaatgcacccaataaactccaatatgtcctaaaatcatgttttggtgcttttttaaagtatttcattccagtcaaaaacatcgcacccgtgtgggccaatattggcattaattgacaaaagttcgccgcgagaatcacgaagtgagtttttgcgacgattgcacccaatatactcaaatatgtctaaaaatcatgtttttgtgctttttgaactttttcaatctagtcaaaaacatcgcacccatgtcggccaatattggcattaattgacaaaagttctccgcgagaatcacaaagtgagtttttgccacgaacgcacccaatacactccaatatgtccaaaaatcatgtttttgtgctttttgaactttttcaatctggtcaagaacatcgcacccgtgtgggccaatattggcattaatagacaaaagttcgccgcgcgaatcacgaagtgagttttagccacgaacgaacccaatacactccaatatgtccaaaaatcattttttggtgcttttttgaactctttcaatccggtcagaaacatcgcacccgtgtgggctactattggcattaattgacaaaagttcgccgggcgaatcaagaagtgagttttagccacgaacgcacccaatacactccaatatgtcctaacatcattttttggtgcttttttgaactttttcattccggtcaaaaacatcgcacacgtgtcggccaatattggcattaattgacaaaagttccccgcgcgaatcaagaagtgagttttagccatgaacgcaccgaatactctccactatgtccaaaaatcatgttttggtgcttttttgaactttttcattctggacaaaaacaccgcacccgtttcggcaaaaatatgccaatattggcattaattgacaaaagttcgccgcgtgtatcacgaactgagtttttgccacgaacggacccaatacactccaatatgtccaaaaatcttgttttggtgatttttgaactttttcgttcaggtcaaaaacatcgcacccgtttgcgcaaaaatatgccaatattggcattaattgacaaaagttcgccgcgagaatcacgaagtgagtttttgccacgaacgcacccaatatactcaaatatgtctaaaaatcatgtttttgtgcttgttgaactttttcaatccggtcaaaaacatcgcacccgtgtgggcaatattggcattaattgacaaaagttcgccgcgcgaatgacgaagtaagtttttgccacgaacgcacccaataaactacaatatgtcctaaaatcatgttttggtgagtttttgaactttttcattccggacaaaaacaccgcacccgtttgggcaaaaatatgctaatattggcattaattgccaaaagttcgccgcgtgtatcacgaactgagtttttgccacgaacggacccaatacactccaatatgtccaaaaatcatgtttttgtgctttttgaactttttcaatccggtcaaaaacatcgcacccgtgtgggcaatattggcattaattgacaaaagttcgccgcgcgaatcacgaagtaagtttttgccacgaacgcacccaataaactccaatatgtcctaaaatcatgttttggtgagtttttgaactttttcattccggacaaaaacaccgcacccgtctgggcaaaaatatgctaatattggcattaattgacaaaagttcgccgcgtgtatcacgaactgagtttttgccacgaacggacccaatacactccaatatgtccaaaaatcatgttttggtgatttttgaactttttcgttcaggtcaaaaacatcgcacccgtttgcgcaaaaatatgccaatattggcattaactgacaaaagttcgccgcgagaatcacgaagtgagttttagcacgaacggacccaatacactccaatatgtcgaaaagtcatgttttggtgcttttttgaactttttcattccggacaaaaacatcgcacccgtgtgggccaatattggcattaattgacaaaagttcgccgcgcgtatcacgaagtgagtttttgccacgaacgcacccaatgcactccaatatgtcctaaaatcatgttttggtgctttttgaacattttcataccggtcaaaaacatcggacccgtttggccaatattggcattaattgacaaaacttccccgcgcgaatcaagaagtgagttttagccacgaacgtaccgaatacactccaatatgtccaaaaatcatgctttggtgctttttttaactttttcattacggacaaaaacatcgcaccagtgtgggccaatattggcatttattgacaaaagttcgccgcgtgtatcacgaagtgagttttagccacgaacgcaccgaatacactccaatatgtccaaaaatcattttttggtgcttttttgaactttttcattaaggtcaaaaacatcgcacccgtgtgggctaatattggcattaactgacaaaagttcgccgggcgaatcacgaagtgagttttagccacgaacgcaccgaatacactccaatatgtccaaaaatcattttttggtgcttttttgaactttttcattaaggtcaaaaacatcgcacccgtgtgggctaatattggcattaattgttaaaagttcgccgggcgaatcatgaagtgagttttagccacgaacgcacccaatacactccaatatgtccaaaaatcttttttggtgcttttttgaactttttcattaaggtcaaaaacatcgcacccgtgtcggccaatattggcattaattgacaaaacttccccgcgcgagtcaagaagtgagttttagccacgaacgtaccgaatacactccaatatgtccaaaaatcatgctttggtgcttttttgaactttttcattacggacaaaaacatcgcacccgtgtgggccaatattggcattaattgacaaaaattcgccgcgtgtatcacgaagtgagtttttgccacgaacgcacccaatacactccaatatgtccaaaaatcatgttttggtgatttttgaactttttcattccggtcaaaaacatcgcacccgtgtgggccaatattggcattaattgacaaaagttcgccgcgtgtatcacgaagcgagtttttgccacgaacgcacccaatacactccaatatgttcgaaaatcatgttttggagctttttgaactatttcattccggtcaaaaagatcgcacccgagtgggccagtattggcattaattgacaaaagttcgccgcgcgaatcacgaggtgagtttttgccacgaatgcaaccaatacacttgatgcgaacccgctagggtttgtggcccgatctttcgatgagaggtaagggataactcgattagatgaagtcgacgttcacggcccgactacaactgtccaaagacgctgcgccttagcaaccgatacaccgtctccaatggtcgccgcgaacttgtggtgcgcgtcaacccggccacgagggcactcgtcctgcaagcaatcgaagaacaagcaagaacaagtaggacaagcactgagattgctagataaagatgaaagtttcactatcaaacacaatatggtggggttccgattacaggcagacgggcggtttagccaacacgcgcgctgcgagccggtagcaagaagctatctctatcatcaaaaacccgcctgttcttggcggcgactagaggtataaaaagaggggaagaacgaccatagggtcgtgctccaccctaggacgcgcccctattgggcccaacatggatacacagcccattgggccaaaagaggtgacgtagcaccatggacaaaaaatagtcgggagtaaaatgacaattgcggccgctccagaacagatatggacatgtggctggatccatttgaaagtagacttgataagctttccatgaagtacttgcacgcccaaatcggagttcgcatgaagtcgtggcggccgtcagaagttggcgctgccctgcagtccgaatccaccccgcgcgaatcctcttccctttggatcctctccatcgttcctgagtaaaacacgagtgcacgcgtctccgaggtataaagacgaggaatatgaactcaagaaagaactcacctgataatttagttgacgtgcacgagcgcgggtaataggaccatcatgctgtatatggggggacgtggatgtatcgatggtgttgatgtcctcatcatcctccccttcttgcatttgagtcgtcctcgactcaagctcatcttctcgcaaatacggcttcaaatctgcaacgttaaatgtgggactaaccccgaaatctgcaggcaaatcaatcttatatgcattctcattaatctttgctaacactttaaatggtccatcagctctaggcatcaatttagactttctcaaatcaggaaatcattcttttcgcaaatgcaaccaaaccaaatctccaggttcaaaattcaattcccttctacctttgtcaccagcaaacttatacttagcattcatgcgctctatgttttctttagttgtctcatgcagttttaacatcaactcagcacgttgcttagcatcaaaattcagtttttcagaagatggtaaaggcatcaaatcaattggagcacgaggcaacaaaccatacacaatctgaaatgggcacatttttgtagtagaatgcaaggaacgattataagcaaattcaatatgaggcaagcattcttcccacatcttgatatttttcttcaaaacagccctaagcatagtagacaaggttctattcaccacttcagtttgtccatcagtttggggatgacaagtagtagaaaacaaaagtttagtccccaatttagcccacaaagttctccaaaaatggctaagaaattttgtgtcacgatcaaaaacaatagtgtttggcacaccatgcaagcgaacaatttctcgaaagaacaaatcagcaatatgagaagcatcatcagttttatgacatggtatgaaatgtgccattttagaaaatcgatccacaaccacaaaaatgctatcacgccccctcttggtcctaggcaatcctaacacaaaatccattgaaatatcttcccaaggaacagtaggaacaggaagaggcatatacaaaccatgtggatgtaagcgtgacttagccttttgacatgtagcgcagcgagcaacgaacctgccaacatctcttcgcatctgtggccaaaagaaatgactagcaaggatgtcatgtgtcttcttggcaccaaaatgtcccatcaaaccgcctccatgcgcttcctgcaacaacaacaagcaaacggagctagctggaatgcatagcttgttagctctgaaaacaaacccatcattgatgacgaatttgttccatgttcttccatccttacaatgcagcaacacatcattaaaatcagcatcatgcgcatattggtctttgattgtttccaggacaaaaatcttgtagtcaagttgtgtcaacaaagtgtatctcctagacaaagcatcagcaatgatgttctccttccctttcttgtgtttgataacataaggaaaagattcaataaattcaacccatttagcatgtctacggttcagcttccctttgactacgaatatgcttcaaagactcatgatcagaatgtatgacaaattccttgggccacaaataatgctgccatgtttctaaagttcgcacaagagcatacaattccttatcataagtagaataattcagaacaggcccactcaacttttcactaaaatatgcaacaggttttccttcttgtagcaaaataccacccaatccaatcccactagcatcacattcaagttcaaaagtcttattaaaatcgggaagttggaggagaggtgcatgggtcaacttatctttcaacatgtggaaggcgttctcttgtgatgtgccccaagtgaaaggcactcccttctttgtaagcgcattcaatggtgcagcaatggtgctgaaatcctgcacaaagcggcgatagaaccccgcgagtcctagaaagctccgcacttgtgagaccgttttaggagtcggccaactctgaattgcctcaaccttggcttgatcaacctcaatcccctgcggagttacaacatagccaagaaaagaaactcgatctgtgcaaaaggtgcacttctcaaggttaccaaataaacgtgcatcacgaagagcattaaaaacagcacgtaaatgattaaaatgttcacccatagacttgctgtaaatcaagatatcatcaaagtagaccaccacaaattttccaatgaaaggacgcaaaacctcattcatcaacctcatgaaagtgctgggtgcattagttaaaccaaaaggcatcactaaccactcatacaacccaaacttcgttttaaatgctgttttccattcatcacccaacttcatacgaatctggtggtaaccactacgcaaatcaactttggagaacacaatagagccactcaattcatcaagcatatcatctaacctaggaataggatgacgatatcgaatggtaatgttattaatagctctacaatcaacacacatacgccatgaaccatctttctttggtaccaaaattaccggaaccgcacatggactaagagactcgcgtacataccctttatcaagcaactcatgaacttgacgctgaatctccttggtttcctcagggttggttcggtatggcgcacggttcggtagggaagcacctgggatcaagtcgatttgatgctcaatgccgcgcaccggtggcagcccggtggcacttccttgggaaacacatcagagtactcctgcaaaatgttagcaacagcagggggcaaagaatgctgcatatcgtgaagtgaaatcaaagcatctttgcataccaaagcataggcaactgaaggtgatgcaatcaactcagtagtatcagatttagtagcaagtaagcatttgggtttcaaattgattgtctcaggtttcttgccatcagattgggcttttttatcactctcacatttggatttggcagccttagcaacatcatcacgcaaaatatcttcaggagacatgggatgcaacacaattttcttatcatggtacagaaaagagtactggttggacctaccatgatgcatagaatccctatcaaattgccatggtctacctagcagaatattacatgcttgcatgggcacaacatcacattcaacaacatcatggtaatttccaattgcaaaattaatgtgcaccagttttgttaccttcgccttaccactgttgttcagccattggatgtagtatggatgtgggtgcggtttggtgctaagtgcaagcttctccaccatctcgctgctagccaagttgttgcagctacctccatcaatgatcatgcggcaacaacgctctttgacgacacactttgtttggaacaacgtgtgtcgctgattttgctccgccttctccatttgtgcgctaaggacacgctgcacaatgaggctctcatagtgatccgcaaatgcagccccaatgtgctcttccggtggctcattatctgcatggtcagccgcaagcaaagcaagtgtatcatcatcgaaatcactagcagaggagtactcaccatcgtttttgactaccaaaactcgcttgctagggcagtcacgctgcacatgcccaaagcccttgcaacggtggcactgaacatctctcattcggcctgtggatgccattgaagaagcactcggtgctggctgagcggcctttgtcgctgacttgtcactagatggaggaggtgctgctcgactggttgtgggtgtggaagatggagaagcagtacggccggccggaggagtggtgcgtgtctgccatgatgaagttttacctgcagaaaaattagccttggcactagcacgtcgtccttgcacttccctttcagccttacaagcaagatgaaacaatcgggtcatattagtgtaatctttatagtctacgatgtcataaatctcgcggtttaacccacccaaaaatctagccatggcagcgtcctcagtttcctctaaattacaacgaagcaagcccatttgtaactcctgataatattcctctacacttttcgcaccctgtctcaattgttgcaatctattcagcaagtcacgtgcatagtaagaaggaacaaatctagcccgcatgacccgtttcaaagcatcccaagtttgtggcatgttattaggatttttcttgccatgttctatccaccaaaccgaagcaaaatcggtgaactcactcgtagcagctctaactctagtgttctcaggaaactcatggcatgcaaatttttggtcaacagcaatctcccaagagaggtacgcatcaggatcatattttccatcaaaaggaggaatcttaaatttaattttagaaaaagcatcatcattcctgatgaaccctgagttcctctcgacactcaaggctgttgttggcccgatctttcggtgagttgtgataactacgatttgggagaaacgttgacgatccgactacaaccgtacgagacgttgtgttgcgccttagcgatcgatacacctctccgtgggttgctgatcttgccggtgcagatcaaccctattcctgcaagcaaatcgaagaaacaagcaagaacaagataaaagcaatctgttattgcaaataggaatttaatacaaatgataagttggggttccgaagaacaagcagacggacggtctagccgacacgcgtgctgcaagcaagtagcaatggctaaactttaattgaacaaaacccgagaaaccctgaaggggtaactagctatatataggggtgggaggacgacctaggggtgcctagggtcgtgctccaccagcttggggcgcaccccacatgggccccacctgggccggggtcccaaatgaagttacaagcccataggcccattataggtgatgcaacaccttgttcctgtgattctggccacacgagatagaattcagagaagaggctggatccgttagaaagagggctccgagagctttccatcaagtactcacgggccgaaaacggaggtcgtatgcagattcggtgaccgtttgaagtcagcagtgtagtaggtggccgaatcggattccagcacttggagtacttgatctcgatatcttcttgttcatccatgatgtgagcaatggttgcatccgtggtagccatggtcacatcatcctccccttcttcacggaaaaccgtcctcggtttttccatatggtgctctttgcgtagtccatttacaacaacctgtttcttccaatcaaaacaaggcaaactcgagacaatttggttagcaataacatttttctctagcttgcatattttatccacatgtacaggaggttctaaatccgagcagatgtaaactctatgcacaaaatatattccaagatcattatattcaccaaagatgtgaaatataacattggttggatatggcaaatcagacttagcaaataatttctccttgaaattatcgagctcacaaaaatcatcaaactgaacatagcccaaagtatttaaagaagatctcaattcacgctcctctacttcattagcaatgtgaacaacatgcttaaaatcagtgcagtatgaattaacagtaggaatagcatgttcattcacaagttgtggcatggatataagtgaagcattatcgcataactcttctttatcacaaggaacagcaaacaaatcaatttgtgacaaaggaatctcagcagttggttcctctaatggttgctctgctatagcatgaaaagtggacaaattcaattcattaacaacacactcacctttattaatttcagcaccattaagtttacctttgatgccctcttcagataatggaggtgcctcgactttgagtgtgatcaatgggactggcggctctttcatgtctctctcctccttttcatgattatgcacttcctgcaaatggttagtaatagaagacaaaaacatagcatgttgcttcttcatgtcctcctctattttactttcagcattgcaagcaagttgtaacaaatgagaacgagatgtatatctttgacaatcaagcatgtcctgaatttctttgttaagcccacataaaaacctcaattctttagcttcttcgcattcatctaaaccacaacgtaataaacaagcttgcatattatgatagtatgaagtaacagttctggtatcttgttttaaacattgcagtttgttgaacaaaatgtcagcataatacatgggaacataaacatctctgaaatatcgtttcaggtctttccaagattgtggtattttgttatgcctacaaagatgtttccaatcattagaagcatgtttaattaaaacactagaggcacacataaccttttgtttctccgacaagacatgcttttgaaattcactatcaaccgctagctcccaattaatgtaagcacgaggatcatagtctccctcgaaataaggcagtgcagatttgatcttacctagaacatcatcacttacctcataatggtcatgttgatccctcctcatgtctcgacgaagatgtcgatgttgagcacagctatccccaattatcttgcgtatccctgccattgttagtagaaaacaagaaacatacacaaaaatatgcgcgttcctattaactactaggtagtggcagctcaaaaatcgcacacactcaagcttttaaccaagctcttacaagatcttaccaatgcaagtggaatggtgacatacaccgactcaaccaagcaccccaatgaaggttggatgtatcgatgccttggcaaacacttgcggtacagctgtaatcaaatatgtggagctctgggtaggcttaaatatttagcaaaggaatagcaaaggaatagcaaatgctcaaatcattttttggtgcttttttgaactctttcaatccggtcagaaacatcgcacccgtgtgggctactattggcattaattgacaaaagttcgccgggcgaatcacgaagtgagttttagccacgaacgcacccaatacactccaatatgtcctaacatcattttttggtgcttttttgaactttttcattccggtcaaaaacatcgcacacgtgtcggccaatattggcattaattgacaaaagttccccacgcgaatcaagaggtgagttttagccatgaacgcaccgaatactctccactatgtccaaaaatcatgttttggtgcttttttgaactttttcattccggacaaaaacaccgcacccgtttgggcaaaaatatgctaatattggcattaattgacaaaagttcgccgcgtgtatcacgaactgagtttttgccacgaacggacccaatacactccaatatgtccaaaaatcatgttttggtgatttttgaactttttcgttcaggtcaaaaacatcgcacccgtttgcgaaaaaatatgccaatattggcattaattgacaaaagttcgccgcgagaatcacgaagtgagtttttgccacgaacgcacccaatatactccaatatgtctaaaaatcatgtttttatgctttttgaactttttcaatccagtcaagaacatcgcaaccatgtgggccaatattggcattaattgacaaaacttccccgcgcgaatcaagaagtgagttttagccacgaacgtaccaaatacactccaatatgtccaaaaatcatggtttggtgctttttttaactttttcattacggacaaaaacatcgcacccgtgtgggccaatattggcattaattgacaaaagttcgccgcgtgtatcacgaagtgagtttttgccacgaacgcacccaatacactccaatatgttcgaaaatcatgttttggagctttttgaacgattcatttcggtcaaaaagatcgcacccgagtgggccagtattggcattaattgacaaaagttcgccgcgcgaatcacgaggtgagtttttgccacgaacgcaaccaatacactcaattatgtcctaaaatcatgttttggtgagtttttgaactattttattccggtcaaaaacatcgcacccgtgtcggccaatattggcattaattgacaaaagttagccgagcgaatcatgaagcgagtttttgccacgaacgcacccaatacactccaatatgtccaaaaatcatgttttggtgatttttgaactttttcgttcaggtcaaaaacatcgcacccgtttgcgcaaaaatacgacaatattggcattaattgacaaaagttcgccgcgagaatcacgaagtgagtttttgccacgaacgcacccaatatactccaatatgtctaaaaatcatgtttttgtgctttttgaactttttcaatccagtcaagaacatcgcacccatgtgggccaatattggcattaattgacaaaacttccccgcgcgaatcaagaagtgagttttagccacgaacgtaccgaatacactccaatatgtccaaaaatcatggtttggtgctttttttaactttttcattacagacaaaaacatcgcacccgtgtgggccaatattggcattaattgacaaaagtttgccgcgtgtatcacgaagtgagtttttgccacgaacgcacccaatacactccaatatgttcgaaaatcatgttttggagctttttgaacgattcatttcggtcaaaaagatcgcacccgagtgggccagtattggcattaattgacaaaagttcgccgcgcgaatcacgaggtgagtttttgccacgaacgcaaccaatacactcaattatgtcctaaaatcatgttttggtgagtttttgaactattttattccggtcaaaaacatcgcacccgtgtcggccaatattggcattaattgacaaaagttagccgagcgaatcatgaagcgagtttttgccacgaacgcacccaatacactccaatatgtccaaaaatcatgttttggtgatttttgaactttttcgttcaggtcaaaaacatcgcacccgtttgcgcaaaaatacgacaatattggcattaattgacaaaagttcgccgcgagaatcacgaagtgagtttttgccacgaacgcacccaatatactccaatatgtctaaaaatcatgtttttgtgctttttgaactttttcaatccagtcaagaacatcgcacccatgtgggccaatattggcattaattgacaaaacttccccgcgcgaatcaagaagtgagttttagccacgaacgtaccgaatacactccaatatgtccaaaaatcatggtttggtgctttttttaactttttcattacagacaaaaacatcgcacccgtgtgggccaatattggcattaattgacaaaagtttgccgcgtgtatcacgaagtgagtttttgccacgaacgcacccaatacactccaatatgttcgaaaatcatgttttggagctttttgaacgattcatttcggtcaaaaagatcgcacccgagtgggccagtattggcattaattgacaaaagttcgccgcgcgaatcacgaggtgagtttttgccacgaacgcaaccaatacactcaattatgtcctaaaatcatgttttggtgagtttttgaactattttattccggtcaaaaacatcgcacccgtgtcggccaatattggcattaattgacaaaagttagccgagcgaatcatgaagcgagtttttgccacgaacgcacccaatacactccaatatgtccaaaaatcatgttttggtgatttttgaactttttcgttcaggtcaaaaacatcgcacccgtttgcgcaaaaatacgacaatattggcattaattgacaaaagttcgccgcgagaatcacgaagtgagtttttgccacgaacgcacccaatatactccaatatgtctaaaaatcatgtttttgtgctttttgaactttttcaatccagtcaagaacatcgcacccatgtgggccaatattggcattaattgacaaaacttccccgcgcgaatcaagaagtgagttttagccacgaacgtaccgaatacactccaatatgtccaaaaatcatggtttggtgctttttttaactttttcattacagacaaaaacatcgcacccgtgtgggccaatattggcattaattgacaaaagtttgccgcgtgtatcacgaagtgagtttttgccacgaacgcacccaatacactccaatatgttcgaaaatcatgttttggagctttttgaacgattcatttcggtcaaaaagatcgcacccgagtgggccagtattggcattaattgacaaaagttcgccgcgcgaatcacgaggtgagtttttgccacgaacgcaaccaatacactcaattatgtcctaaaatcatgttttggtgagtttttgaactattttattccggtcaaaaacatcgcacccgtgtcggccaatattggcattaattgacaaaagttagccgagcgaatcatgaagcgagtttttgccacgaacgcacccaatacactccaatatgtccaaaaatcatgttttggtgatttttgaactttttcgttcaggtcaaaaacatcgcacccgtttgcgcaaaaatatgacaatattggcattaatttacaaaagtgcgccgcgagaatcacgaagtgagtttttgccacgaacgcacccaatacactccaatatgtctaaaaatcatgtttttgtgcgttttgaactttttcaatccggtcaagaacatcgcacccgtgtgggccaatattggcattaattgacaaaacttccccgggcgaatcacgaagtgagttttagccacgaacgcacccaatacactcaaatatgtccaaaaatcatttttttggtgcttttttgaactttttcattaaggtcaaaaacatcgcacccgtgtcggccaatattggcattaattgacaaaagttcgccgcgtgtatcacgaagtgagtttttgccacgaacacacccaatacactccaatatgttcgaaaatcatgttttggagctttttgaactatttcattccgatcaaaaacatcgcacccgagtgggccagtattggcattaattgacaaaagttcgccgcgcgaatcacaaggtgagtttttgccacgaacgcaaccaatacactcaattatgtcctaaaatcatgttttggtgagtttttgaactattttattccggtcaaaaacatcgcacccgtgtcggccaatattggcattaattgacaaaagttcgccgagcgaatcatgaagcgagtttttgccacgaacgcacccaatacactccaatatgtctaaaaatcatgttttggtgatttttgaacattttcataccggtcaaaaacatcggacccgtttgggcaaaaatatgccaatattggcattaatttacaaaagtgcgccgcgagaatcacgaagtgagtttttgccacgaacgcacccaatacactccaatatgtctaaaaatcatgtttttgtgcgttttgaactttttcaatccggtcaagaacatcgcacccgtgtgggccaatattggcattaattgacaaaagttcgctgggcgaatcacgaagtgagttttagccacgaacgcacccaatacactcaaatatgtctaaaaatcatttttttggtgcttttttgaactttttcattaaggtcaaaaacatcgcacccgtgtcggccaatattggcattaattgacaaaacttccccgcgcgaatcaagaggtgagttttagccatgaacgcaccgaatactctccactatgtccaaaaatcatgttttggtgcttttttgaactttttcattccggacaaaaacaccgcacccgtttgggcaaaaatatgctaatattggcattaattgacaaaagttcgccgcgtgtatcacgaactgagtttttgccacgaacggacccaatacactccaatatgtccaaaaatcatgttttggtgatttttgaactttttcgttcaggtcaaaaacatcgcacccgtttgcgaaaaaatatgccaatattggcattaattgacaaaagttcgccgcgagaatcacgaagtgagtttttgccacgaacgcacccaatatactccaatatgtctaaaaatcatgtttttatgctttttgaactttttcaatccagtcaagaacatcgcaaccatgtgggccaatattggcattaattgacaaaacttccccgcgcgaatcaagaagtgagttttagccacgaacgtaccaaatacactccaatatgtccaaaaatcatgttttggtgctttttgaacattttcattccggtcaaaaacatcgcacccgtgtcggccagtattggcattaactgacaaaagttcgccgcgtgtatcacgaagtcagttttggccacgaacgcacccaatatactccaatatatccaaaaatcatgttttggtgctttttgaactctttcattccggtcaaaaacatcgcacccgtgtgggccaaaatatgccaaaattagcattaattgacaaaaggtcgccgagcgaatcacgaagtgagtttttgtcacgaacgcacccaataaactccaatatgtccaaaaatcatgttttggtgattttagaactttttcattccggtcaaaaacatcacagctgagtcggccaatattggcattaattgacaaaagttcgccgcgtgtatcacgaactcagttttttccacgaacgcaccgaatagactccaatatgtccaaaaatcatgttttggtgctttttgaactttttcattcaagtcaaaaacatcgcacccgtgtgggccaaaatatgccaaaattagcattaattgacaaaaggtcgctgcgcgaatcccgaagtgagtttttgcctcgaacgcacccaatacactccaatatgtccaaaaatcatgttttggtgctttttgaactttttcattccggtcaaaaacatcgcacccgtgtgggccaatattggcattaattgacaaaagttcgccgcgtgtatcacgaagtcagtttttgccaagaacgcacccaatacactccaatatgtccaaaaatcatgttttggtgttttttgaacattttcattccggtcaaaaacatcgcacccgtgtgggccaatattggcattaattgacaaaagttcgccgcgcgaatcacgaagtgagtttttgccatgaacacatccaatacactccaatatgtccaaaaaccatgttttcgtgctttttcaactttttcattccggtcaaaaacatcgcacccgtgtgggccaatattagcattaattgacaaaagttcgccgcacgaatcacgaagtgagtttttgccacgaacgcatccaatacactctaattgtccaaaaatcatgttttggtgctttttgaagtttttcattccggccaagaacatcgcacccgtgtcggccaatattggcattaattgacaaaagttcgccgcgtgtatcacgaagtgaatttttgccacgaacgcacccaatacactccaatatgtcctaaaatcatgttttggtgatttttgaactttttctttccggtcaaaaacatcgcacccgagtcggccaatatgtgccaatattggcattaattgacaaaagttcgccgcgtgtatcacgaagtcagtttttgtcaagaacgcacccaatatactccaatatgtccaaaaatcatgttttggtgctttttgaacattttaagtccagtcaaaaacctcgcacccgtgtgggccaatattggcattaactgacaaaagttcgtcgcgtgtatcacgaagtcagtttttgtcacgaacgcacccaatacactccaatatgtccaaaaatcatgttttggtgatttttgaactttttcattccggtcaaaaacatcgcacccgagtcgcccaatatatgccaatattggcattaattgacaaaagttcgccgcgaatcacgaagtgagtttttgccacgaacgcatcgaatacactctaatatgtccaaaaatcctgttttggtgctttttgaagtttttcattccggccaagaacatcgcacccgtgtgagccaatatatgccaatattggcattagtttagaaatgttcgccgcgcgaatcacaaagtgagtttttgccacgaacgcacccaatacactctaatatgtccaaaaatcatgttttggtgctttttgaactttttcattccggttaaaaacatcgcacccgtgtcggccagtattggcattaactgacaaaagttcaccgcgtgtatcacgaagtcagttttggccacgaacgcacccaatatactccaatatgtccaaaaatcatgttttggtgctttttgaactctttcattccggtcaaaaacatctcacccgtgtgggccaaaatatgccaaaattagcattaattgacaaaaggtcgccgagcgaatcacgaagtgagtttttgtcacgaacgcacccaataaactcgaatatgtccaaaaatcatgttttggtgattttagaactttttcattccggtcaaaaacatcacagccaagtcggccaatattggcattaattgacaaaagttcgccgcgtgtatcacgaactcagttttttccacgaacgcaccgaatagactccaatatgtccaaaaatcatgttttggtgctttttgaactttttcattcaagtcaaaaacatcgcacccgtgtgggccaaaatatgccaaaattagcattaattgacaaaaggtcgctgcgcgaatcccgaagcgagtttttgcctcgaacgcacccaatacactccaatatgtccaaaaatcatgttttggtgctttttgaactttttcattccggtcaaaaacatcgcacccgtgtgggccaatattggcattaattgacaaaagttcgccgcgtgtatcacgaagtcagtttttgccaagaacgcacccaatacactccaatatgtccaaaaatcatgttttggtgttttttgaatattttcattccggtcaaaaacatcgcacccgtgtgggccaatattggcattaattgacaaaagttcgccgcgcgaatcacgaagtgagtttttgccatgaacacatccaatacactccaatatgtccaaaaaccatgttttcgtgctttttcaactttttcattctggcgaagaacaaagcacccgtgtgagccaatttatgccaatgttggcattagttgagaaatgttcgctgcgaatcacgaagcgagtttttgccacgaacgcacccaatacactccaatatgtccaaaaatcatgttttggagctttttgaactttttcattccggtcaaaaacatcgcacccgtgtcagccaatattggcattaattgacaaaagttcgccgcgcgaatcatgaagtgagtttttgccacgaacgcacccaacacactccaatatgtccaaaaatcatgttttggtgatttttgaactttttctttccggtcaaaaacatcgcacccgagtcggccaatatatgccaatattggcattaattgacaaaatttcgccgcgcgaatcacgaagcgagtttttgccatgaacacatccaatacacaccaatatgtccaaaaatcatgttttcgtgctttttcaactttttcattccggtcaaaaacatcgcacccgtgtgggccaatattagcattaattgacaacagttcgccgcgcgaataacgaagtgagtttttagcacgaacgcacccaatacactccaatatgtccaaaaatcatgtattggtgttttttgaacattttcagtccagtcaaaaacatcgcaccagtgtgggccaatattggcattaattgacaaaagttcgccgcgtgtatcacgaactcagttttttccacgaacgcacccaataaactccaatatgtccaaaaatcatgttttggtgctttttaaactttttcattccggtcaaaaacatcgcacccgtttgggcccaaatatgcataaattagcattacttgactaaaggtcgccgcgcgaatcccgaagtgagtttttgcctcgaacgcacccaatacattccaatatgtccaaaaatcatattttggtgctttttgaactttttcatttcggtcaaaaacatcgcacccgtttgggccaaaatatgcataaattagcattacttgacaaaaggtcgccgcgcgaatcccgaagtgagtttttgcctcgaacgcacccaatacactccaatatgtccaaaaatcatattttggtgctttttgaactttttcattcctgtcaaaaacatcgcacccgtgtgggccaatattggcattaattgacaaatgttcgccgcgcgaatcacgcagtgtgtttttgccacgaacgcacccaatatactccaatatgtccaaaaatcatgttttggtgatttttgaactttttctttccggtcaaaaacgtcgcgcacgagtcggccaatatatgccaatattggcattaattgacaaaagttcgccgcgagaatcacgaagtgagtttttgccatgaacacatccaatacactccaatatgtccaaaaaccatgttttcgtgctttttcaactttttcattccggtcaaaaacatcgcacccgtgtgggccaatattagcattaattgacaaaagttcgccgcgcgaatcacgaagtgagtttttgccacgaacacatccaatacactctaatatgtccaaaaatcatgttttggtgctttttgaagtttttcattccggtcaaaaacatcgcacccgtgtgggccaatattagcattaaatgacaaaagttcgccgcgcgaatcacgaagtgagtttttgccacgaacgcatccaatacactctaatatgtccaaaaatcaagttttggtgtttttcgaagtttttcattctggcgaagaacaaagcacccgtgtgagccaatttatgccaatattggcattagttgagaaatgttcgctgcgaatcacgaagcgagtttttgccacgaacgcacccaatacactccaatatgtccaaaaatcatgttttggagctttttgaactttttcattccggtcaaaaacatcgcacccgtgtcggccaatattggcattaattgacaaaagttcgccgcgtgtatcacgaactcagttttttccacgaacgcacccaataaactccaatatgtccaaaaatcatgttttggtgctttttgaactttttcattccggtcaaaaacatcgcacccgtttgggccaaaatatgcataaattagcattacttgacaaaaggtcgccgcgcgaatcccgaagtgagtttttgcctcgaacgcacccaatacattccaatatgtccaaaaatcatattttggtgctttttgaactttttcatttcggtcaaaaacatcgcacccgtttgggccaaaatatgcataaattagcattacttgacaaaaggtcgccgcgcgaatcccgaagtgagtttttgcctcgaacgcacccaatacactccaatatgtccaaaaatcatattttggtgctttttgaactttttcattccggtcaaaaacatcgcacccgtgtgggccaatattggcattagttgacaaatgttcgccgcgcgaatcacgcagtgtgtttttgccacgaacgcacccaatatactccaatatgtccaaaaatcatgttttggtgatttttgaactttttctttccggtcaaaaacgtcgcgcacgagtcggccaatatatgccaatattggcattaattgacaaaagttcgccgcgagaatcacgaagtgagtttttgccatgaacacatccaatacactccaatatgtccaaaaaccatgttttcgtgctttttcaactttttcattccggtcaaaaacatcgcacccgtgtgggccaatattagcattaattgacaaaagttcgccgcgcgaatcacgaagtgagtttttgccacgaacacatccaatacactctaatatgtccaaaaatcatgttttggtgctttttgaagtttttcattccggtcaaaaacatcgcacccgtgtgggccaatattagcattaaatgacaaaagttcgccgcgcgaatcacgaagtgagtttttgccacgaacgcatccaatacactctaatatgtccaaaaatcaagttttggtgtttttcgaagtttttcattctggcgaagaacaaagcacccgtgtgagccaatttatgccaatattggcattagttgagaaatgttcgctgcgaatcacgaagcgagtttttgccacgaacgcacccaatacactccaatatgtccaaaaatcatgttttggagctttttgaactttttcattccggtcaaaaacatcgcacccgtgtgggccaatattggcattaattgacaaaagttcgccgcgcgaatcatgaagtgaatttttgccacgaacaaacccaacacactccaatatgtccaaaaatcatgttttggtgatttttgaactttttctttccggtcaaaaacatcgcacccgagtgggccaatatatgccaatattggcattaattgacaaaatttcgccgcgcgaatcacgaagcgagtttttgccatgaacacatccaatacactccaatatgtccaaaaatcatgttttggtgctttttcaactttttcattccggtcaaaaacatcgcacccgtgtgggccaatattagcattaattgacaacagttcgccgcgcgaatcacgaagtgagtttttagcacgaacgcacccaatacactccaatatgtccaaaaatcatgtattggtgttttttgaacattttcagtccagtcaaaaacatcgcaccagtgtgggccaatattggcattaattgacaaaagttcgccgcgcgaatcacgaagtgagtttttgccacgaacgcatccaatacactctaatatgtccaaaaatcatgttttggtgcttttcgaagtttttcattctggcgaagaacatagcacccgtgtgggccaatttatgccaatattggcattagttgagaaatgttcgccgcgaatcacaaagcgagtttttgccacgaacgcacccaatacactccaatatgtccaaaaatcatgttttggtaatttttgaactttttcattccggtcaaaaagatcgcacccgtgtcggccaatattggcattaattgacaaaagttcgccgcgtgtatcacgaactcagttttttccacgaacgcacccaataaactccaatatgtccaaaaatcatgttttggtgctttttaaactttttcattccggtcaaaaacatcgcacccgtttgggcccaaatatgcataaattagcattacttgactaaaggtcgccgcgcgaatcccgaagtgagtttttgcctcgaacgcacccaatacattccaatatgtccaaaaatcatattttggtgctttttgaactttttcatttcggtcaaaaacatcgcacccgtttgggccaaaatatgcataaattagcattacttgacaaaaggtcgccgcgcgaatcccgaagtgagtttttgcctcgaacgcacccaatacactccaatatgtccaaaaatcatattttggtgctttttgaactttttcattccggtcaaaaacatcgcacccgtgtgggccaatattggcattaattgacaaatgttcgccgcgcgaatcacgcagtgtgtttttgccacgaacgcacccaatatactccaatatgtccaaaaatcatgttttggtgatttttgaactttttctttccggtcaaaaacgtcgcgcacgagtcggccaatatatgccaatattggcattaattgacaaaagttcgccgcgagaatcacgaagtgagtttttgccatgaacacatccaatacactccaatatgtccaaaaaccatgttttcgtgctttttcaactttttcattccggtcaaaaacatcgcacccgtgtgggccaatattagcattaattgacaaaagttcgccgcgcgaatcacgaagtgagtttttgccacgaacacatccaatacactctaatatgtccaaaaatcatgttttggtgctttttgaagtttttcattccggccaagaacatcgcacccgtgtgagccaatatatgccaatattgccattagtggagaaatgttctccgcgcgaatcacgaagtgagtttttgccacgaacgcacccaacacactccaatatgtccaaaaatcatgttttggtgctttttgaactttttcattccggtcaaaaacatcgcacccgtgtgggccaatattagcattaaatgacaaaagttcgccgcgcgaatcacgaagtgagtttttgccacgaacgcatccaatacactctaatatgtccaaaaatcatgttttggtgctttttgaagtttttcattccggtcaaaaacatcgcacccgtgtgggccaatattagcattaaatgacaaaagttcgccgcgcgaatcacgaagtgagtttttgccatgaacacatccaatacactccaatatgtccaaaaatcatgttttcgtgcttttcaactttttcattccagtcaaaaacatcgcacccgtgtgggccaatattagcgttaattgacaaaagttcgccgcgcgaatcaagaagtgagtttttgccacgagcacatccaatacactctaatatgtccaaaaatcatgttttggtgctttttgaagtttttcattccggccaagaacatcgcacccgtgtgagccaatatatgccaatattgccattaattgacaaaagttcgccgcgcgaatcacgaagtgtgtttttgccacgaacgcacccaacacactccaatatgtccaaaaatcatgttttcgtgctttttcaactttttcattccggtcaaaaacatcgcacccgtgtgggccaatattagcattaattgacaaaagttcgccgcgcgaatcacgaagtgagtttttgccacgaacacatccaatacactctaatatgtccaaaaatcatgttttggtgctttttgaagtttttcattccggccaagaacatcgcacccgtgtgagccaatatatgccaatattgccattagtggagaaatgttcgccgcgcaaatcacgaacatcgcacccggaatatatggtagtcaatatgtcaattaattgacatatttttcaactttttcattccggtcaaaaacatcgcacccgtgtgggccaatattggcattagttgagaaatgttcgccgtgaatcacgtagtgaggttttgccacgaacgcacccaatacactccaatatgtttaaaaatcatgttttggtgctttttgaactttttcattccggtcaaaaacatcgcacccgtgtgggccaacatatgcaaaaattagcattaattgacaaaaggtcgccgcacgaattacgaagtgagtttttgtctcgaacgcacccaatacactccaatatgtcccaaaatcatgtttttgtgctttttgaagtttttcattctggccaagatatattgggtgcgttcgaggcaaaaactcacttcgggattcgcgcggcgaccttttgtcaagtaatgctaatttatgcatattttggcccaaacgggtgcgatgtttttgaccggaatgaaaaagttcaaaaagcaccaaaacatgatttttggacatattggagtttattgggtgcgttcgtggaaaaaactgagttcgtgatacacgcggcgaacttttgtcaattaatgccaatattggccgacacgggtgcgatctttttgaccggaatgaaaaagttcaaaaattaccaaaacatgatttttggacatattggagtgtattgggtgcgttcgtggcaaaaactcgctttgtgattcgcggcgaacatttctcaactaatgccaatattggcataaattggctcacacgggtgctatgttcttcgccagaatgaaaaacttcgaaaagcaccaaaacatgatttttggacatattagagtgtattggatgcgttcgtggcaaaaactcacttcgtgattcgcgcggcgaacttttgtcaattaatgccaatattggcccacactggtgcgatgtttttgactggactgaaaatgttcaaaaaacaccaatacatgatttttggacatattggagtgtattgggtgcgttcgagctaaaaactcacttcgtgattcgcgcggcgaacttttgtcaactaatgctaatattggcccacacgggtgcgatgtttttgaccggaatgaaaatgttgaaaaagcacgaaaacatgatttttggacatattggtgtgtattggatgtgttcatggcaaaaactcgcttcgtgattcgcgcggcgaaattttgtcaattaatgccaatattggcatatattggccgactcgggtgcgatgtttttgaccggaaagaaaaagttcaaaaatcaccaaaacatgatttttggacatattggagtgtgttgggtgcgttcgtggcaaaaactcacttcatgattcgcgcggcgaacttttgtcaattaatgccaatattggctgacacgggtgcgatgtttttgaccggaatgaaaaagttcaaaaagctccaaaacatgatttttggacatattggagtgtattgggtgcgttcgtggcaaaaactcgcttcgtgattcgcagcgaacatttctcaactaatgccaatattggcataaattggctcacacgggtgctttgttcttcgccagaatgaaaaacttcgaaaaacaccaaaacttgatttttggacatattagagtgtattggatgcgttcgtggcaaaaactcaattcgtgattcgcgcggcgaacttttgtcatttaatgctaatattggcccacacgggtgcgatgtttttgaccggaatgaaaaacttcaaaaagcaccaaaacatgatttttggacatattagagtgtattggatgcgttcgtggcaaaaactcacttcgtgattcgcgcggcgaacttttgtcatttaatgctaatattggcccacacgggtgcgatgtttttgaccggaatgaaaaagttcaaaaagcaccaaaacatgatttttggacatattggagtgtgttgggtgcgttcgtggcaaaaactcacttcgtgattcgcgcggagaacatttctccactaatggcaatattggcatatattggctcacacgggtgcgatgttcttggccggaatgaaaaacttcaaaaagcaccaaaacatgatttttggacatattagagtgtattggatgtgctcgtggcaaaaactcacttcttgattcgcgcggcgaacttttgtcaattaacgctaatattggcccacacgggtgcgatgtttttgactggaatgaaaaagttgaaaagcacgaaaacatgatttttggacatattggagtgtattggatgtgttcatggcaaaaactcacttcgtgattcgcgcggcgaacttttgtcatttaatgctaatattggcccacacgggtgcgatgtttttgaccggaatgaaaaacttcaaaaagcaccaaaacatgatttttggacatattagagtgtattggatgtgttcgtggcaaaaactcacttcgtgattcgcgcggcgaacttttgtcaattaatgctaatattggcccacacgggtgcgatgtttttgaccggaatgaaaaagttgaaaaagcacgaaaacatggtttttggacatattggagtgtattggatgtgttcatggcaaaaactcacttcgtgattctcgcggcgaacttttgtcaattaatgccaatattggcatatattggccgactcgtgcgcgacgtttttgaccggaaagaaaaagttcaaaaatcaccaaaacatgatttttggacatattggagtatattgggtgcgttcgtggcaaaaacacactgcgtgattcgcgcggcgaacatttgtcaattaatgccaatattggcccacacgggtgcgatgtttttgaccggaatgaaaaagttcaaaaagcaccaaaatatgatttttggacatattggagtgtattgggtgcgttcgaggcaaaaactcacttcgggattcgcgcggcgaccttttgtcaagtaatgctaatttatgcatattttggcccaaacgggtgcgatgtttttgaccgaaatgaaaaagttcaaaaagcaccaaaatatgatttttggacatattggaatgtattgggtgcgttcgaggcaaaaactcacttcgggattcgcgcggcgaccttttgtcaagtaatgctaatttatgcatattttggcccaaacgggtgcgatgtttttgaccggaatgaaaaagttcaaaaagcaccaaaacatgatttttggacatattggagtttattgggtgcgttcgtggaaaaaactgagttcgtgatacacgcggcgaacttttgtcaattaatgccaatattggccgacacgggtgcgatctttttgaccggaatgaaaaagttcaaaaattaccaaaacatgatttttggacatattggagtgtattgggtgcgttcgtggcaaaaactcgctttgtgattcgcggcgaacatttctcaactaatgccaatattggcataaattggctcacacgggtgctatgttcttcgccagaatgaaaaactttgaaaagcaccaaaacatgatttttggacatattagagtgtattggatgcgttcgtggcaaaaactcacttcgtgattcgcgcggcgaacttttgtcaattaatgccaatattggcccacactggtgcgatgtttttgactggactgaaaatgttcaaaaaacaccaatacatgatttttggacatattggagtgtattgggtgcgttcgtgctaaaaactcacttcgtgattcgcgcggcgaacttttgtcaattaatgctaatattggcccacacgggtgcgatgtttttgaccggaatgaaaaagttgaaaaagcacgaaaacatgatttttggacatattggtgtgtattggatgtgttcatggcaaaaactcacttcgtgattcgcgcggcgaaattttgtcaattaatgccaatattggcatatattggccgactcgggtgcgatgtttttgaccggaaagaaaaagttcaaaaatcaccaaaacatgatttttggacatattggagtgtgctgggtgcgttcgtggcaaaaactcacttcatgattcgtgcggcgaacttttgtcaattactgccaatattggctgacacgggtgcgatgtttttgaccggaatgaaaaagttcaaaaagctccaaaacatgatttttggacatattagagtgtattgggtgcgttcgtggcaaaaactcgcttcgtgattcgcagcgaacatttctcaactaatgccaatattggcataaattggctcacacgggtgctttgttcttcgccagaatgaaaaacttcgaaaaacaccaaaacttgatttttggacatattagagtgtattggatgcgttcgtggcaaaaactcacttcgtgattcgcgcggcgaacttttgtcatttaatgctaatattggcccacacgggtgcgatgtttttgaccggaatgaaaaacttcaaaaagcaccaaaacatgatttttggacatattagagtgtattggatgtgttcgtggcaaaaactcacttcgtgattcgcgcggcgaacttttgtcaattaatgctaatattggcccacacgggtgcgatgtttttgaccggaatgaaaaagttgaaaaagcacgaaaacatggtttttggacatattggagtgtattggatgtgttcatggcaaaaactcacttcgtgattctcgcggcaaacttttgtcaattaatgctaatattggcccacacgggtgcgatgtttttgaccggaatgaaaaagttgaaaaagcacgaaaacatgatttttggacatattggagtgtattggatgtgttcatggcaaaaactcacttcgtgattcgcgcggcgaacttttgtcaattaatgccaatattggcatatattggccgactcgggtgcgatgtttttgaccggaaagaaaaagttcaaaaatcaccaaaacatgatttttggacatattggagtgtattgggtgcgttcgtggcaaaaattcacttcatgattcgcgcggcgaacttttgttaattaatgccaatattggaggacacgggtgcgatgtttttgaccggaatgaaaaagttcaaaaagctccaaaacatgatttttggacatattggagtgtattgggtgcgttcgtggcaaaaactcacttcgtgattcgcgcggcgaacttttgtcatttaatgctaatattggcccacacgggtgcgatgtttttgaccggaatgaaaaagttcaaaaagcaccaaaacatgatttttggacatattggagtgtgttgggtgcgttcgtggcaaaaactcacttcgtgattcgcgcggagaacatttctccactaatggcaatattggcatatattggctcacacgggtgcgatgttcttggccggaatgaaaaacttcaaaaagcaccaaaacatgatttttggacatattagagtgtattggatgtgctcgtggcaaaaactcacttcttgattcgcgcggcgaacttttgtcaattaacgctaatattggcccacacgggtgcgatgtttttgactggaatgaaaaagttgaaaaagcacgaaaacatggtttttggacatattggagtgtgttgggtgcgttcgtggcaaaaactcacttcgtgattcgcgcggagaacatttctccactaatggcaatattggcatatattggctcacacgggtgcgatgttcttggctggaatgaaaaacttcaaaaagcaccaaaacatgatttttggacatattagagtgtattggatgtgctcgtggcaaaaactcacttcttgattcgcgcggcgaacttttgtcaattaacgctaatattggcccacacgggtgcgatgtttttgactggaatgaaaaagttgaaaagcacgaaaacatgatttctggacatattggagtgtattggatgtgttcatggcaaaaacacacttcgtgattcgcgcggcgaacttttgtcaattaatgtcaatattggcatatattggccgactcgggtgcgatgtttttgaccggaaagaaaaagttcaaaaatcaccaaaacatgatttttggacatattggagtgtgttgggtgcgttcgtggcaaaaactcacttcctgattgatgcagcaacgggggttcccgatctttcgatgagaggaggataaactttgatttggggaaggatacgacgttggcggtccgactacaactaccacaagggtgctgcgccttagcaaccggtacaccgactccacgttgttgctgttcttgccgtgccaagaacaaccttgaacctgcaagcaatcgaagaacaagcaagaacaagttgacaaggaaacagctcacggcacttgtcaaatgatgaaacttaaacaaaccaaaatggggttctgaatacaagtatccgggtggtctagccgacacacgcgagtacaaggaagtagctgcagctaaacttacatcaaaacaaaacccaaagtgcaaaatggtggctgctaggagtttatataggtggaggaatgaccaggagaggaggtgggagcaaaccctaggttatgtggacccctaatgggctgtaatgatacaaggcccaagcccaagtttctgatgtaaagaactattttcgtcattctgagcagcctgggtcagagttgatggtgaggccacacatagctgaaagtagacgacgagatctttccaacaagtactcatttgccccgtttgccctccggagtgaagagcattgacttcatcaaatcagcgctgctagtgctgcttgcgatttggttcctctcccatattcctaacaacaagtagatcacaacaaccatttagtagcacccaattctgagaagaacttgtatgattagctaggaatgactttacctaataattaagttcacgagctcgagctctagtcattggtccttgctgtgcaataggcgtggttgtatcgttggaagggatgtcctcatcatcctccccttcttgcatttgagtcgtcctcgactctaactcatcttcttctcccaaatatggctttgaatctgcaatgttaaatgtggggctaacaccaaaatcggcaggtagctcaagcttgtatgcattgtcattaatcttttgtagcactttgaaaggaccatcagctctaggtagcaacttagattttctcaaattagggaacctatcctttctcaaatgcaaccaaaccaaatcaccaggttcaaaagcaacatgtttctttcctttgctcccagcaagtttatacttaatattcatgtgctctatgttctccttagtggtctcatgcagttttaacatcaattcagcgcgatattttgcatcaaagttcactctctctgaagttgggaggggcaaaagatcaattggagcacggggtagaaggccataaacaatctcaaaagggcacttcttagtagtagaatgttgtgaacgattataagcaaactcaacatgaggcaaacattcttcccacattttaatattctttttcaaaacagccctaagcattgtagataatgttctattcaccacctcagtttgtccatcagtttgggggtgacatgtagtagaaaataaaagtttagtccccaacttagcccacaaggttctccaaaaatgactaaggaattttgtatcgcgaacaatctcacgaaagaacaaatcagcaacatgtgtagcatcatcactcttatgacaaggtatgaaatgcgccatcttagaaaatctatctacaacaacaaagatactgtccctccccttctttgttctaggcagccctaaaacaaagtccatagaaatatcctcccaaggcacactaggaacaggcaaaggcatatacaaaccatgagggttaaggcgtgacttagctttttggcatgttgtgcagcgagcaacgaacctctccacgtctctcctcatcttaggccaaaagaaatgatcagcaaggatatcctccgtcttcttcacaccaaagtgtcccatcagccctccaccatgcgcttcctgcaataatagcatacgcacggagctagctggaatgcataacttattagctctaaacacaaacccattggtgagaacgaatttgttccaagtccttccctccttgcaattcaacaacacatctttaaaatcatcatcgtgcgcatattgctcttttattgtttctaagccaaaaattttgaagtcaagttgggatagcattgcgtaacgtttagacaaagcatcagcaatgacattttcttttcccttcttatgtttgatgacatatggaaaagattcaataaattcaacccatttagcatgcctacggttaagttttgcttgacttcgaatgtgtttcaaagattcatgatcagagtgtataacaaattctttgggccataaataatgctgccatgtttccaatgttcgcactagagcaaacaattccttatcataagtagaataattcaaactaggcccactcaatttctcgctgaaatatgctacaggtttgccttcttgtaacaacacaccacccaatccaatcccactagcatcacattcaagctcaaaagttttgttgaaatcaggaagttggagtaaaggagcgtgtgttaacttatctttcaaagtgtcgaatgcattcctttgtgctgcagcccaagtgaatgtgacatttctcttggtaagctcatgtaatggggctgcaatggtgctaaaatccttcacaaagcggcggtagaacccagcaagtcctagaaagcttctcacttgtgtgatcgttgttggaaccggccagctatgtatggcttcaaccttggcttgatctacttcaattccctgcggagtcacaacatagccaagaaaagagactcgatctgtgcaaaatgtgcacttctcaaggttaccaaataaacgtgcatctcgtagagcatcaaaaacagcacgcaaatgaccatgatgatcctctattgatctgctatatatgagaatgtcatcaaaatataccaccacaaatctgccaatgaaagcacgtaaaacttcattcattaatctcatgaaagtactgggtgcattagtgagaccaaagggcatgactaaccactcatataggccgaatttagttttaaaagctgttttccattcatctcctaacttcatgcgaatctggtggtaaccactacgcaaatcaattttagagaacacaagtgaaccactcaattcatcaagcatatcatctagcctagggataggatgacgatatctgattgtgatgttgttaattgctctacaatccacacacatgcgccatgagccatctttcttaggaactaaaagcacggggacagaacaaggactaagagactcacgtacataccccttgtcgagtaactcttgcacttgacgctgaatctcctttgtttcctccgggttggtcctgtatggcgcacggtttggcagagaggccccaggaatgaggtcaatttggtgctcaatccctcgaattggtggcagccccggtggaacctcctttgggaaaatatcagcatactcctgcaaaaggttagtgaccggaggaggcaaagaaataggagtatcctcaattggaaataaggtttctttgcaaaccaaagcatagcaaacaacagtgtcagtgtcaacttcatccaaatctgattttgttgcaatgaaacaagatcccttcagcttaatctcatttttattattttgaacagagttggtgggtttcttcttatgcttctcaagttcattagccgcaataagatgctcactcctagtacgctcctgatttttttgtttgctagctctagcaagttcatcctttaaaataacttcaggagacataggatgtaacacaagtttttttccattatgcacaaaggagtattgattggatttgccaaagtgtaaagaatctttatcaaactgccatggcctacctaataacatagaacatgcttgcataggcacaacatcacagttgattgaatcatgataagaaccaatggcaaaatgtactcttaccaatcgtgttacctttaccttgtcgctgctattaagccattgaatatagtagggctgtggatgtggctgtgtgctcaatgcaagtttctccaccatttcagcactagccaaattattgcagcttcctccatctatgatgatgaggacatcaacaccatcgatacatccacgtccccccatgtacagcatgatggtcctattacccgcgcttgtgcacgtcaactaaattatcaggtgagttctttcttgagttcatattcctcgtctttataccccggagacgcgtgcactcgtgttttactcaggaacgatggagaggatccaaagggaagaggattcgcgcggggtggattcggactgcagggcagcgccaacttctgacggccgccacgacttcatgcgaactccgatttgggcgtgcaagtacttcatagaaagcttatcaagtctactttcaaatggatccagccacatgtccatatctattctggagcggccgcaattgttattttactcccgactattttctgtccatggtgctgcgtcacctcttttggcccaatgggctgtgtatccaagttgggcccattaggggcgcgtcctagggttggagcacgaccctatggtcgttcttcccctctttttatacctctagttgccgccaagaacaggcgggttttaatgatagagatagcttcttgctaccagctcgcagcgcgcgtgttggctaaaccgcccgtctgcctgtaatcggaaccccaccatattgagtttgatagtgaaactttcatctttatctagcaatttcagagcttgtcctacttgttcttgcttgttcttcgattgcttgcaggacgagtgccctcgtggccgggttgacgcgcaccacaagttcgcggcgaccattggagacggtgtatcggttgctaaggcgcagcgtctttggacagttgtagtcgggccgtgaacgtcgtcttcatctaatcgagttatcccttacctctcatcgaaagatcgggccacaaaccctagcgggttcgcatcatatgatcacgcggcaagagcgttccttgatcacacacttggtttgaaacaaggtgtggcgctgattctgttcagccctttccatttgtgcgcttagcactcgctgcaccacgaggctctcatagtgctctgcagcttcagccccaatgtgttcctcatcttggtggggcgcgtcaccttcccctgcattgttagttgcaagcaaagcataggtttcttcatctaaatcactagcggaggagtacccaccatcagctctcacaatcattacacgagtgcttgggcagtccttgcgcacgtgaccatagcccttgcagcgtaggcactgaatatctcttgtccttcctgatgaagctactgatgatgagctcttggaaggtgtagcagcaacccctcttgttggttcactcgggcatggtgtagagtttgttgtagagggacgcagcttgttgcttgaggacgatggtgctgctgctcgagttgacggtgcagcagcgttagaagatgtccaagagctagcacgacctgcagaaatgttagtcctgaagctagctcttcgtccctgtacttccctttcagctttacaagcaagatgaaacaaacgattaattgaattatattctttgtaggctagaatgtcctgaatttctcggttcagcccacccatgaatctagccataccagcatcatcattttctaccaatccacaacgaagcattcctgtttgcaaagcttgataatactcctctacagatttgtttccctgtctaagttgttgcaatttgtgcagcaaatcacgtgcatgatatgaaggaacaaatctagctcgcatgactcttttcattgcatcccaggtttggggagtgttatttggattggaacgaacaaattcactccaccaaatggatgcaaaatcagtgaactcactagtagcagccctaacacgtttattctcaggaaaatcatggcaagcaaatttctgatcaatggctaactcccaagtaagatatgcatcagggtcatattttccatcaaagcaaggaatggtaaacttgatcttgcctaaagaatcatcattatcacgtacctcccgccgtggtggagcgcccatgccatggcgctgccggcgctgttgtctttgtggacgaccaagtacctcctcatcatgctcagtgtcagcagcgtactccagttcttcccttgctgtgatgctgctattagcatcatggcaattgtggttgcgcctagccgatccatcatgaccatcttggcccattctctccaacgtattcaagatacctgcaagagaagtgttcacagccacaagggacctctccaatgaggaaagcttggagttggtgtcaatttgagcagcctccaattgaccaaggcgatcattggcaaccctaacatcctcatcaaggccttcagcatgctccctcacttggcgctcaaaatgttgtatgatgcccctcgtacgtggtgaatgttgagggtgctcccccgatcctcctgtcatggttaatgggaagaaacaattcacaagaaatatgttgatgaaccctgagttcctctcgacactcaaggctgttgttggcccgatctttcggtgagttgtgataactacgatttgggagaaacgttgacgatccgactacaaccgtacgagacgttgtgttgcgccttagcgatcgatacacctctccgtgggttgctgatcttgccggtgcagatcaaccctattcctgcaagcaaatcgaagaaacaagcaagaacaagataaaagcaatttgatattgcaaataggaatttaatacaaatgataagttggggttccgaagaacaagcagacggacggtctagccgacacgcgcgctgcaagcaagtagcaatggctaaactttaatctaacaaaacccgagaaaccctgaaggggtaactagctatatataggggtgggaggacgacctaggggtgcctagggtcgtgctccaccagcttggggcgcaccccacatgggccccacctgggccggggtcccaaatgaagttacaagcccataggcccattataggtgatgcaacaccttgttcctgtgattctggccacatgagatagaattcagagaagaggctggatctgttagaaagagggctccgagagctttccatcaagtactcacgggccgaaaacggaggtcgtatgcagattcggtggccgtttgaagtcagcagtgtagtaggtggccgaatcggattccagcacttggagtacttgatctcgatatcttcttgttcatccatgatgtgagcaatggttgcatccgtggtagccatggtcacatcatatgtcctatcaactattggagctatgtgttgtccatctccacttctaccaaacttgtgcaaacgagttcttacatttcttactttgttatgtaaaaggcgttggcaaacagcaagaacagcaacaacggttagtagtaccggagccgacaacaagcacgatcctgtgatatagtagataaaaatttgcggagctataggtggctgcaagtaatatcaaggtacagctagaaccacattaatcaagcaagttgaataatcattcaacgatggtattgtgctggtcctaggcaaaaccctttagagacgcgagcctagtcacaagcgtagccactcaaaatagcacgaaaataacacaaacaaaacagcaacaacaacaacttcctctcttcccttcctttttttttccttctcttcacttctgattttttttttctttctttttttttgttttctttcttttttttttgtacagcaagctcaaagcttcagccaacaagtcaaaacaagaagtaatgatgggttggttggctagttacatgattcagccaacaagtcaaaagtgagagcacttaaatgctttcttgggaagggctgattcacttcaaaaagttgcaaaagggttggctgttggtggaggcagcaataaatgcatttgggggtggctgatgtggtgatgagggtgctgctggttgtggtggacgaaatttggtggggttggaggtggatttcgtggtgaatatggtggtgatggtggcagcgggatgaagataaatgaagtgatggtggaagtgtttgcggtgacgaattcgtgagcagaactcgaaactctaaaggactaaactactagaaccagcaactcaaccaatcgatgcaatcgaaaactcagcaagcaaagactaagtagaatagcaaaggctcaacatattttggtgatttcgggtctgacctattttagtggtttttcttttgggctgtaggtaaaaacaaagaagtgataaaatctctcaccgagcaacttgagctctgataccacttgatgcagcaacgggggttcccgatctttcgatgagaggaggataaacttcgatttggggaaggatacgacgttggcggtccgactacaactaccacaagggtgctgcgccttagcaaccggtacaccgactccacgttgttgctgttcttgccgtgccaagaacaaccttgaacctgcaagcaatcgaagaacaagcaagaacaagttgacaaggaaacagctcacggcacttgtcaaatgatgaaacttaaacaaaccaaaatggggttctgaatacaagtatccgggtggtctagccgacacacgcgagtacaaggaagtagctgcagctaaacttacatcaaaacaaaacccaaagtgcaaaatggtggctgctaggagtttatataggtggaggaatgaccaggagaggaggtgggagcaaaccctaggttttgtggacccctaatgggctgtaatgatacaaggcccaagcccaagtttctgatgtaaagaactattttcgtcattctgagcagcctgggtcaaagttgatggtgaggccacacatagctgaaagtagacgacgagatctttccaacaagtactcatttgccccgtttgccctccggagtgaagagcattgacttcatcaaatcagcgctgctagtggtgcttgcgatttggttcctctcccatattcctaacaacaagtagatcacaacaaccatttagtagcacccaattctgagaagaacttgtatgattagctaggaatgactttacctaataattaagttcacgagctcgagctctagtcattggtccttgctgtgcaataggcgtggttgtatcgttggaagggatgtcctcatcactgattcgcgcggcaaacttttgtcaattaatgccaatattggccgacacgggtgcgatgtttttgaccggaatgaaaaagttcaaaaagctccaaaacatgatttttggacatattggagtgtattgggtgcgttcgtggcaaaaactcgcttcgtgattcgtggcgaacatttctcaactaataccaatattggcataaattggctcacacgggtgctatgttcttcgccagaatgaaaaacttcgaaaagcaccaaaacatgatttttggacatattagagtgtattggatgcgttcgtggcaaaaactcacttcgtgattcgcgcggcgaacttttgtcaattaatgccaatgttggccacacgggttcgatgtttttgactggactgaaaatgttcaaaaaacaccaatacatgatttttggacatattggagtgtattgggtgcattcgtggcaaaaactcacttcgtgattcgcgcggcgaacatttctcaactaatgccaatattgccatatattggctcatatcttggccagaatgaaaaacttcaaaaagcacaaaaacatgattttgggacatattggagtgtattgggtgcgttcgaggcaaaaactcacttcgtaattcgtgcggcgatcttttgtgaattaatgctaattttggcatattttggcccacacgggtgcgatgtttttgaccggaatgaaaaagttcaaaaagcaccaaaacatgatttttggacatattggagtgtattcggtgcgttcgtggcaaaaactcactacgtgattcacggcgaacatttctcaactaatgccaatattggcataaattggctcatacgggtgcaatgtttttggccggaaagaaaaacttcaaaaagcaccaaaacatgatttttggacatattagaatgtattggatgcgttcgtggtaaaaactcacttcgtgattcgcggcgaacttttgtcaattaatgccaatattgccatatattggccgactcgggtgcgatgtttttgaccggaatgaaaaagttcaaaaatcaccaaaaaaataatttttggacatattggagtgtattgggtgcgttcgtggcaaaaactcacttcgtgattcgcccggcgaccttttgtcaattaatgctaattttgcatattttggccaacacgggtgggatgtttttgaccggaataaaatgttcaaaaagcaccaaaacttgatttttggacatattggagtgtattgggtgcgttcgttgcaaaaactcacttcgtgattcgcgcggcgaactttggtcaactaatgctaatattggcccacttgggtgcgatgtttttaaccagaatgaaaaagttcaaaaagcaccaaaacatgatttttggacatattggagtatattgggtgcgttcgtggcaaaaactaactttatgattcgcgcggcgaacttttgcaattaatgccaatattggcccacacggcggcgaacttcgtgattcgcggcgaacttttgtcaattaaagccaatattggcatatattagctgactcgggtgcgatgtttttgaccggaatgaaaatgttcaaatctcaccaaaacatgatttttggacatattggagtatattgggtgcgttcgtagcaaaaactcacttcgtgattcgcgcgacgaacttttgtcaatgaatgccaatattggcccacacgggtgcgacgtttttgaccggaatggaaatgttcaaaaagcaccaaaacatgatttttggatatattggagtgcattgggtgcgttcgtggcaaaaactcacttggtgattcgcgcggcgaccttttgtcaattaatgctaattttggcatattttggcccacacgggtgcgatgtttttgaccggaatgaaaatgttcaaaaagcaccaaaacatgatttttggacatattggagtgtattcggtgcgttcgtggcaaaaactcactacgtgattcacggcgaacatttctcaactaatgccaatattggcataaattggctcagacgggtgcaatgtttttggccggaaagaaaaacttcaaaaagcaccaaaacatgatttttggacatattagaacgtattggatgcgttcgtggtaaaaactcacttcgtgattcgcggcgaacttttgtcaattaatgccaatattgccatatattggccgactcgggtgcgatgtttttgaccggaatgaaaaagttcaaaaatcaccaaaaaaataatttttggacatattggagtgtattgggtgcgttcgtggcaaaaactcacttcgtgattcgcccggcgaccttttgtcaattaatgctaattttggcatattttggcccacacgggtgggatgtttttgaccggaataaaatgttcaaaaagcaccaaaacatgatttttggacatattggagtatattgggtgcgttcttggcaaaaactgacttcgtgatacacgcggcgaacttttgtcaattaatgccaatattggcccacacgggtgcgatgtttttgaccggaatggaaaagttcaaaaagcaccaaaacattatttttggacatattgtagtgtattgggtgcgttcgtcgcaaaaactcacttcgtgattcgcgcggcgaacttttgtcaatcaatgctaatattggcccacacgggtgcgatgtttttgaccggaatgaaaaagttcaaaatgcaccaaaacatgattgttggacatattggagtgtattgggtgcgttcgtagaaaaaactcacttcgtgattcccgcggcgaacatttctcaactaatgccaatattggcatatattggctcacatgggtgcgatgtttttggccggaatgaagaacttcaaaaagcaccaaaacatgatttttggacatattagagtgtattggatgcgttcgtggcaaaaactcacttcgtgattcgcggcgaacttttgtcaattaataccaatattggcatatattggctgactcgggtgcgatgtttttgaccggaatgaaaaagttcaaaaatcaccaaaacatgatttttggacatatttgagtgtattgtgtccgttcgtggcaaaaactcacttggtgattcgcgcggcgaccttttgtcaattaatgctaattttggcatattttggcccacacgggtgcgatgtttttgaccggaatgaaaatgttcaaaaagcaccaaaacatgatttttggacatattggagtgtattcggtgcgttcgtggcaaaaactcactacgtgattcacggcgaacatttctcaactaatgccaatattggcataaattggctcagacgggtgcaatgtttttggccggaaagaaaaacttcaaaaagcaccaaaacatgatttttggacatattagaatgtattggatgcgttcgtggtaaaaactcacttcgtgattcgcggcgaacttttgtcaattaatgccaatattgccatatattggccgactcgggtgcgatgtttttgaccggaatgaaaaagttcaaaaatcaccaaaaaaataatttttggacatattggagtgtattgggtgcgttcgtggcaaaaactcacttcgtgattcgcccggcgaccttttgtcaattaatgctaattttggcatattttggcccacacgggtgggatgtttttgaccggaataaaatgttcaaaaagcaccaaaacatgatttttggacatattggagtatattgggtgcgttcttggcaaaaactgacttcgtgatacacgcggcgaacttttgtcaattaatgccaatattggcccacacgggtgcgatgtttttgaccggaatggaaaagttcaaaaagcaccaaaacattatttttggacatattgtagtgtattgggtgcgttcgtcgcaaaaactcacttcgtgattcgcgcggcgaacttttgtcaatcaatgctaatattggcccacacgggtgcgatgtttttgaccggaatgaaaaagttcaaaatgcaccaaaacatgattgttggacatattggagtgtattgggtgcgttcgtagaaaaaactcacttcgtgattcccgcggcgaacatttctcaactaatgccaatattggcatatattggctcacatgggtgcgatgtttttggccggaatgaagaacttcaaaaagcaccaaaacatgatttttggacatattagagtgtattggatgcgttcgtggcaaaaactcacttcgtgattcgcggcgaacttttgtcaattaataccaatattggcatatattggctgactcgggtgcgatgtttttgaccggaatgaaaaagttcaaaaatcaccaaaacatgatttttggacatatttgagtgtattgtgtccgttcgtggcaaaaactcacttggtgattcgcgcggcgaccttttgtcaattaatgctaattttggcatattttggcccacacgggtgcgatgtttttgaccggaatgaaaatgttcaaaaagcaccaaaacatgatttttggacatattggagtgtattcggtgcgttcgtggcaaaaactcactacgtgattcacggcgaacatttctcaactaatgccaatattggcataaattggctcagacgggtgcaatgtttttggccggaaagaaaaacttcaaaaagcaccaaaacatgatttttggacatattagaacgtattggatgcgttcgtggtaaaaactcacttcgtgattcgcggcgaacttttgtcaattaatgccaatattgccatatattggccgactcgggtgcgatgtttttgaccggaatgaaaaagttcaaaaatcaccaaaaaaataatttttggacatattggagtgtattgggtgcgttcgtggcaaaaactcacttcgtgattcgcccggcgaccttttgtcaattaatgctaattttggcatattttggcccacacgggtgggatgtttttgaccggaataaaatgttcaaaaagcaccaaaacatgatttttggacatattggagtatattgggtgcgttcttggcaaaaactgacttcgtgatacacgcggcgaacttttgtcaattaatgccaatattggcccacacgggtgcgatgtttttgacccgaatggaaaagttcaaaaagcaccaaaacattatttttggacatattgtagtgtattgggtgcgttcgtcgcaaaaactcacttcgtgattcgcgcggcgaacttttgtcaatcaatgctaatattggcccacacgggtgcgatgtttttgaccggaatgaaaaagttcaaaatgcaccaaaacatgattgttggacatattggagtgtattgggtgcgttcgtagaaaaaactcacttcgtgattcccgcggcgaacatttctcaactaatgccaatattggcatatattggctcacatgggtgcgatgtttttggccggaatgaagaacttcaaaaagcaccaaaacatgatttttggacatattagagtgtattggatgcgttcgtggcaaaaactcacttcgtgattcgcggcgaacttttgtcaattaataccaatattggcatatattggctgactcgggtgcgatgtttttgaccggaatgaaaaagttcaaaaatcaccaaaacatgatttttggacatatttgagtgtattgtgtccgttcgtggcaaaaactcacttggtgattcgcgcggcgaccttttgtcaattaatgctaattttggcatattttggcccacacgggtgcgatgtttttgaccggaatgaaaatgttcaaaaagcaccaaaacatgatttttggacatattggagtgtattgggtgcgttcgtggcaaaaactcactacgtgattcacggcgaacatttctcaactaatgccaatattggcataaattggctcagacgggtgcaatgtttttggccggaaagaaaaacttcaaaaagcaccaaaacatgatttttggacatattagagtgtattggatgcgttcgtggcaaaaactcacttcgtgattcgcggcgaacttttgtcaattaatgccaatattgccatatattggccgactcgggtgcgatgtttttgaccggaatgaaaaagttcaaaaatcaccaaaaaaataatttttggacatattggactgtattgggtgcgttcgtggcaaaaactcacttcgtgattcgcccggcgaccttttgtcaattaatgctaattttggcatattttggcccacacgggtggtatgtttttgaccggaataaaatgttcaaaaagcaccaaaacttgatttttggacatattggagtgtattgggtgcgttcgttgcaaaaactcacttcgtgattcgcgcggcgaactttggtcaactaatgctaatattggcccacatgggtgcgatgtttttaaccagaatgaaaaagttcaaaaagcaccaaaacatgatttttggacatattggagtatattgggtgcgttcgtggcaaaaactaactttatgattcgcgcggcgaacttttgcaattaatgccaatattggcccacacggcggcgaacttcgtgattcgcgccgaacttttgtcaattaaagccaatattggcatatattagctgactcgggtgcgatgtttttgaccggaatgaaaatgttcaaatctcaccaaaacatgatttttggacatattggagtatattgggtgcgttcgtagcaaaaactcacttcgtgattcgcgcgacgaacttttgtcaatgaatgccaatattggcccacacgggtgcgacgtttttgaccggaatgaaaatgttcaaaaagcaccaaaacatgatttttggacatattggagtgtattgggtgcgttcttggcaaaaactgacttcgtgatacacgcggcgaacttttgtcaattaatgccaatattggcccacacgggtgcgatgtttttgaccggaataaaaaagttcaaaaagcaccaaaacatgatttttggacatattgtagtgtattgggtgcgttcgtcgcaaaaactcacttcgtgattcgcgcggcgaacttttgtcaattaatgctaatattggcccacacgggtgcgatgtttttgaccggaatgaaaaagttcaaaaagcaccaaaacatgattgttggacatattggagtgtattgggtgcgttcgtagaaaaaactcacttcgtgattcccgcggcgaacatttctcaactaatgccaatattggcatatattggctcacatgggtgcgatgtttttggccggaatgaagaacttcaaaaagcaccaaaacatgatttttggacatattagagtgtattggatgcgttcgtggcaaaaactcacttcgtgattcgcggcgaacttttgtcaattaataccaatattggcatatattggctgactcgggtgcgatgtttttgaccggaatgaaaaagttcaaaaatcaccaaaacatgatttttggacatatttgagtgtattgtgtccgttcgtggcaaaaacacacttcgtgattcgcgcggcgaacttatgtcaattaatgctaatattggcccacacgggtgcgatgtttttgaccggaatgaaaaagttgaaaaagcaccaaaacatgattcttggacatattgtagtttattgggtgcgttcgtggcaaaaactcacttcgtgattcgcgcggcgaacatttcttaactagtgccaatattggcatatattggctcacacgggtgcgatgttcttggccggaatgaaaaactttaaaaagcaccaaaacatgatttttggacatattagagtgtattggatgcgttcgtggcaaaaactcacctcgtgattcgcgacgaacttttgtcaattaatgccaatattggcatatattggccgactcggctgcgatgtttttgaccggaatgaaaaagttcaaaaatcaccaaaacatgatttttggacatatttgagtttattgggtgcgttcgtcacaaaaactcacttcgtgattcgctcggcgaccttttgtcaattaatgctaattttggcatgttttggcccacacgggtgcgatgtttttgaccggaatgaaagagttcaaaaagcaccaaaacatgatttttggacatattggagtatattgggtgcgttcgtggccaaaactgacttcgtgatacacgcggtgaacttttgtcagttaatgccaatattggcccacacgggtgcgatgtttttgaccggaatgaaaaagttgaaaaatatgtcaattaattgacatattgactaccatatattccgggtgcgatgttcgtgatttgcgcggcgaacatttctccactaatggcagtattggcatatattggctcacacgggtgcgatgttcttggccggaatgaaaaacttcaaaaagcaccaaaacatgatttttggacatattagagtgtattggatgtgttcgtggcaaaaactcacctcgtgattcgcgacgaacttttgtcaattaatgccaatattggcatatattggccgactcggctgcgatgtttttgaccggaatgaaaaagttcaaaaatcaccaaaatatgatttttggacaaattggagtgtattgggtgcgttcgtggcaaaaactcactttgtgattagcgcagcgaacatttcttaactagtgccaatattggcatatattggctcacacgggtgcgatgttcttggccggaatgaaaaactttaaaaagcaccaaaacatgatttttggacatattagagtgtattggatgcgttcgtggcaaaaactcacctcgtgattcgcgacgaacttttgtcaattaatcccaatattggcatatattggccgactcagctgtgatgtttttgaccggaatgaaaaagttctaaaatcaccaaaacatgatttttggacatattggagtttattgggtgcgttcgtgacaaaaactcacttcgtgattcgctcggcgaccttttgtcaattaatgctaattttggcatattttggcccacacgggtgcgatgtttttgaccggaatgaaagagttcaaaaagcaccaaaacatgatttttggatatattggagtatattgggtgcgttcgtggccaaaactgacttcgtgatacacgcggcgaacttttgtcagttaatgccaatactggccgacacgggtgcgatgtttttgaccggaatgaaaatgttcaaaaagcaccaaaacatgatttttggacatattagagtgtattgggtgcgttcgtggcaaaaactcactttgtgattcgcgcggcgaacatttctaaactaatgccaatattggcatatattggctcacacgggtgcgatgttcttggccggaatgaaaaacttcaaaaagcaccaaaacaggatttttggacatattagagtgtattcgatgcgttcgtggcaaaaactcacttcgtgattcgcggcgaacttttgtcaattaatgccaatattggcatatattggccgactcgggtgcgatgtttttgaccggaatgaaaaagttcaaaaatcaccaaaacatgatttttggacatattggagtgtattgggtgcgttcgtgacaaaaactgacttcgtaatacacgcgacgaacttttgtcagttaatgccaatattggccgtcacgggtgcgatgtttttgaccggaatgaaaaagttcaaaaagcaccaaaacatgatttttggacatattggagtgtattgggtgcgttcgtggcaaaaactcatttcgtgattcgcgcggtgaacttttgtcaattaatgccaatattggcccacacgggtgcgaggttgttgactggacttaaaatgttcaaaaagcaccaaaacatgatttttggacatattggagtgtattgggtgcgttcgtgacaaaaactcacttcgtgattcgctcggcgaccttttgtcaattaatgctaattttggcatatattggcccacacgggtgcgatgtttttgaccggaatgaaaaagttgaaaaggcacaaaaacatgatttttggacatattggagtatattgggtgcgttcgtggcaaaaactcattgcgtgattcgcgcgtcgaacatttgtcaattcatgccaatattggcccacacgggtgcgatgtttttgaccggaatgataatgttcaaaaagcactaaaacatgatttttggacatattggagtgtattgggtgcgttcttggcaaaaactgacttcgtgatacacgcggcgaacttttgtcaataaatgccaatattggcccacacgggtgcgatgtttttggccggaatgaaaaagttcaaaaagcaccaaaacatgatttttggacatatttgattatatggggtgcgttcattgcaaaaactcacttcgtgattcgcgcggcgaactgttgtcaattaatgccaatattggcatatattggccgagtcgggtgcgatgtttttgaccggaatgaaaaagttaaaaaatctccaaaacatgatttttggacatattggagtgtattgggtccgttcgtggcaaaaactcgtttcgtgattcgcgcggcgaacttttgtcaattaatgccaatattggcccacacgggtgcgaggtttttgactggacttaaaatgttcaaaaagcaccaaaacatgatttttggacatattggagtgtattgggtgcgttcttgacaaaaactcacttcgtgattcgcgcggcgaacttttgtcaattaatgccattattggcacacgtgggtgcgatgtttttgacctgaatgaaaaagttcaaaaagcaccaaaacctgatttttggacatattggagtgtattggatgcgttggtgtcaaaaagtcatttcgtgatttacgcggcgaacatttgtcaattaatgccattattggcacacgtgggtgcgatgtttttcaccggaatgaaaaagttcaaaaacatgatttttggacatattggattgtattgggttcgttcgtggcaaaaaatcgcttcgtgatttgcgcggcgaactttttgcaattaatgtcaatattggcacacgtgggtgcgatatttttgaccggatggtagaagttcaaaaagcactgaaaccagatttttggacatattggaatgtattgaatgcgtttgtggcaaaaaatcacttcgtgattcgcacggcgaaattttgtcaagtaatgccaatattggcacacgtgggtgcgatgtttttgacctgaatgaaacacttcaaaaagcaccaaaacctgatttttggacatattggagtgtattggatgcgttcatggcaaaaaatcacatggtgattcgcacaatgaacttttgtcaattcatgccaatattggcacacgtgggtgcgatgtttttgacaggaatgaaaaagtttaaaaagcaccaaaacctgatttttggacatattggagtgtattggatgtgttcgtggcaaaaaatcacttcgtgattcgcgcggcgaacttttgtcaattagtgccaatattggcacacgtgggtgcgatgtatttcactggaatgaaaaagtttaaaaagcaccaaaacatgatttttggatatattggagtgtattggatgcgttcgtagtaaaaaatcacttcttgattcgcgcggcgaacttttgttaattaatgccaatattggaacacgtttgtgcgatatttttgaccggaatgaaaaagttcaaaaagcaccaaaacctgatttttggacatattggagtgtattggatgcgttcgtgtcaaaaaatcgtttcgtgattcgcgaggcgaacttttgtcaattaatgccattattggcacacgtgggtgcgatgtttttgacctgaatgaaaaagttcaaaaagtaccaacacctgatttttggacatattggagtgtactagatgcgttcgtgtcaaaaaatcatttcgtgattcgcgcggcgaacatttgtcaattaatgccattattggcacacgtgggtgcgatatttttgacctgaatgaaaaagttcaaaaagcatcaaaacatgatttttggacatattagagtgtattgggtgcgatcgtggcaaaaaatcacatcttgattcgcgcggcaaacttttgtcaattcatgccaatattggcacacgtgggtgttatgtttttgatcggaatgaaaagttcaaaaagttaccaaaacatgacttttagacatattggagtgtattggatgtgttcgtggcaaaaaatcacttcgtgattcgcgcggcgaacttttgtcaattagtgccaatattgccacacgtgggtgcgatgtttttacctgaatgaaaaagttcaaaaagcaccaaaacctgatttttggacatattggagtgtattggatgcgttcgtggcaaaaaatcacttcgtgattcgcgcggcaaacttttgtcaattaatgccaatatgtgggtgcgacatttttgaccggaatgaaaaagttcaaaaaacatcaaaacctaatttttggatatattggagtgtattgggtgctttcgtggcaaaaatcacttcgtgattcgcgcgtcgaacttgtgtcaattcatgacaatataggcacatgtgggtgtgatgtttttcaccggaatgaaaaagttcaaaaagcaccaaaacatgatttttggacatattggagtgtattgggtgcgttcgtggcaaaaaattacttcgttattcgcgcggcgaacttttgtcacttaatattggcatatattgacacacgtggctgtgatgtttttcaccggaatgagaaagttcaaaaagcaccaaaacatgatttttggacatattggagtattgggtgcgttagtggcaaaaaatcacttcgtgattcgcacggtgaacttttgtgaattaatacctatattggcacacgtgggtgcgatgtttttcactggaatgaaaagttcaaaaagcaccaaaacctgatttttggacatattggagtgtattggatgcgttcgtggcaaaaaatcacttcgtgattcgcgcggcaaacttttgtcaattaatgccaatatgtgggtgcgacatttttgaccggaatgaaaaagttcaaaaaacatcaaaacctaatttttggatatattggagtgtattgggtgcttttgtggcaaaaatcacttcgtgattcgcgcggcgaacttgtgtcaattcatgacaatataggcacatgtgggtgtgatgtttttcaccggaatgaaaaagttcaaaaagcaccaaaacatgatttttggacatattggagtgtattgggtgcgttcgtggcaaaaaattacttcgttattcgcgcggcgaacttttgtcacttaatattggcatatattgacacacgtggctgtgatgtttttcaccggaatgaaaaagttcaaaaagcaccaaaacatgatttttggacatattggagtattgggtgcgttagtggcaaaaaatcacttcgtgattcgcacggtgaacttttgtgaattaatacctatattggcacacgtgggtgcgatgtttttcactgcaatcaaaaagttcaaaaagcaccaaaacatgatttttggacatattggagtgtattggatacgttcgtggcaaaaaatcacttcgtgattcgcgtggcgaacttttgtcaattcatgccaatattgacacacgtgggtgcgatgtatttcactggaatgaaaaagtttaaaaagcaccaaaacatgatttttggatatattggagtgtattggatgcgttcgtagtaaaaaatcacttcttgattcgcgcggcgaacttttgttaattcatgttaatattggcacacgtgggtgcgatgtttttgaccggaatgaaaaagttcaaaaagcaccaaaacatgatttttggacatattggatgttgtattggatgcgttcatggcaaaaaaatcacttcgtgattcgcgcggcgaacttttctcaattcattccaatattggcatatattggcacacatgggtgcgatgtttttcaccggaatgaaaatgttcaaaacgcacccaaacataatttttggacatattggatttattgggttcgttcgtggcaaaaaatcactttgtgattagcgcggcgaatttttgccaatcaatgccaatattagcatatatgagtccgactgctagtcacagtctatgagatatgggtgatctctagatactcttgaaaaggccaggagtatgacttatacgctccaaacggaggggatgcaaacggcagcccaataccagttaagggtttgagtgaaacctgaatcgcacaagactgacaattcagagcatagtccattgtttagttgtgatctggttcaacttaacagtctccatcgaaacactggtataactaacaggttcagttttgagaacatttcttgtgagccatgaaatttggtggggattgttggaataaatgggctaggcccaatttaattaaattaaaatctcaagagcccacaagtaatgttagagacaataatactgctatgaaaatttagatggaagaacctcaacttaaatagggtgatattggagattccctattgaccggttgaggtgatggttggactgccacacacgcacgcgcgctgagtcggccaactgagccgagcctacctgctgctctttcgttttgtaacagacgataataaagtcaccattaacaaatgagagatttattgtattgtaacctccacaacaaatgagagattcattgtgtggtaacctttacaacagatgagatttattttatggtaaccttcacaacaaataagatttatttgtgtggtaatggagatctttctctctctctatatatataacgcaaggcaaaggctctcaaagaatgtgtcttccgcctgctattgttctttggcgatgctctccttctgttcctgcgttgtctctctgtttccccaattctgttcatcccgcgcgcacgggtgatcagaacgagcaggtgcatccgaaactccgatcgcttgagaacctgcacgggtagccgggcgatcaagtttttgggtagcgcttcaagcgcgactgctctgcatcatcttcaccaacatgtcgacaaccagcgacaacaacactggagacaaggagaaggagcctcccgtcaacaccaacggagacaatactgcctcaaactccagcggagggccattcttggggtataacattacactgttaccgttcgttcttcgttttgtcaatcgcaatattattgcgttctcttgtctatgttgatgcttattctatattaagcatgctcatgttatacacatctagcgctgttactagatctactcaaattacaaatgtcatgtttattatcttaatattttgattaaaatataccgaattatgaccaaattttcaacatgcggcttgaattgcccgagcgacttaggaactttttttttcttttggaatgtatttttgctgatttagaatcatgtgtatgaacttccgtatgctctctatttaaaatatggtagggctttttatgttttctacaaaactaaaatcgttgttcctagcggccatctgagctcatcaggagatcataatcgttgttcctagtgaccgtccgagctcattagagaatcacatcactaagatggtatgcctttttagtgctcaacaatgtggcagtgtctaaaattatttacatgtctttgactttctaaaagaaatcgtaatttcaccgctggtccttatgaaaattcaaatttctatgggaaaatatactctccaaaggtcgaaggagaaaccaagagggcatatgaaaaacaaatactccatctattatactccgtagaagataagtaattttgggtgaaccatgggtcaaattcacggtaagtggataacacgcaacacggccctctcggtggtggaaacccacctcgcgtgctctgtgcacggcggggacgctaaggggaggcgaggcgaccacgcgccctccgcgtcaccatggatccgcgcagcagccaggcgcaagaggacggcttcttccacccacgcgacggcgcgtgccccgccgactccaggtcctcccgctcccttgttttagctccgaattctcgcaattctttcgcagggttcgcggttaggagctagttcggtaggaattttagcctcctgtcgcccaaatctaggtagtttatgtggtatacgggaggtaggcagtatctgaatctcatgcgtgctggttcatgatgcaaatcgagcagccttccgttcccggtcgttccaattcagctgattgagttttacctttcgatattccttgcgtagggtttgtgggcaccgagacataagaagatatgcatgagtgagagtattgtccgtgtacaaattggtcttggaagtcagtcttagaattttactagtactaattaagacactgatcatcaactagcatatctatgtctatggtgacgctgttgtgcaaaatagttgcgactcatacatccaatatgtatgtgctaacagcaaatgttttccttattttactaacagcggaaagacagaatgtaaaacccagggttcaattgccacgcgcaaggttcaaaaggctgatcgtgagaaaatgcgaagagatagattgaatgagcagttccaggaacttggaagcacacttggtaaggcacaattgtttgtctcaaatagactactccctccatcccattgtaagtgtagttgtgggtttccgtgtccaacgtttgaccgtccgtcttatttgaaacaattatgaattttttttaaaaaataagtcaggcataaagtactattcatgttttatcatctaataacaatataaaaatacaaatcataaaaaaaatttaaataagacggacggctaattgttggagatagaaacccacaattgcacttaaaatgggaccgagggcataatgacttcttgatggatgtgtatcgatttatttgttctagttaattattctatgtgttatgactggaaaatcatattatgaataaaggaggagttttcttatagaataaattgtccaagagcttgttatctgaaagcacgtgccgtttgaaggatttatttattcatccttctacaaacagctgatatactacttgtttttttgcttttcacaataccaagataacattcctgaatgcaactgtcccctataccattcttgacctctaaaagaacacctcagttccttagcgttcggaatacgccaagttagtaataataagcaaaattaccaaatttagtgcttaacaaatggaattaccgcttaacttacccttcccctgagagaccaataccgcttgacttgataaaaacttctatttttatttattcttgaggttcacttgtttaacagattacacctagttagctttctgtttgggttgatgtaatattgttcctaaccagtcatgttcggtgtcacagtttttaatcttgtcttacataatcctggccacctctccctatggtttcttctcaatttcctactttctcatgactaatattttattgatttgactgtttccatcatgttttttcttttgaattttgtctgtttctaactggtgcacatgcccatttaaataatgactgcaaaatatgctgtaggtcctacactacttgggcatttcacttcgattcttgtacttgagaattatacatttaggtcataagctttgtgtcaatagagattcaagcagtataattagaagctaatgtcatggagcactttgaacatgttcaaggtaaagtttgaccatgcaattagtaactattcaatcagaatcatgtagaagtctcccaatggcatgcttaaactgtatgcaggagcaggaaacagtttgttcagaactaaattatattctttttggaaatcgtgaactttcttagatgcttgaacaaaaactcccacagtttagtaattccgtgatttggagtggctacgatgttaacttgctctgggagaccaataatactttcttgttgtagtcaaactctcacagccgatatttacaagcttttttggctagaactttttcacagcctaaatgtaaagcggaacatgaagcttaccacccacaaacagatgttcctagacaatttattaaacttggaactgttagtgctagcagagtgtgattgagactaaactatttgtgatgcgttactatggtctcaattgagttcatgttatgttcctcacttgccagacctaggggtggtaatgggccatgccctatgggtcctttcacaaccctacttggccgtcctatatttttaggtaaaaaatgtataaaaattcagcctgccccattttagacctagccctcaaattttgtaggctaaaagattaggtccattaccacccaggcctttgatggaaaagtttcaagaacttaaaaaatggtcatatatgctgtttaacgagtgcccgagtaagcataaatacataatcaattgtgtaaatgtaattgttttatatatcagcgtgatatactgatttgttatgcacacttgatcagcatgtcttcattatttgtttctttagcttgtttgtcttcaaaagatccatgcttggccctggactagggctagggtggttatgatataaatttttttggtttcttgctgacaaccaagaccttgtttggataaaaaactattttggttccaacgtactctactgcataaattatagcaactatcaagtattaactgtatcattgttttatattagtggagtaattttcaaattctacaactgttttgttaaaactatcaattgactgcatctttcactggacatttcaggaaactgtagaaatagtgcttggtctggttagcacatgagggtggtggcagagaggggttgcatgctatattatagcacgttgtgtgcgttctttaccactaccacaatgttaatagtcctggttcaaaaatctacttgcacttgtaaaggatcctctgcgtgcttgtaaattctaccatgtctgtaaaccaagccgttgcagctataagagcaagtttaatagtatagccaactgttggctccaattcatctatagccaatctaatagctcatccacacaatagttatctataaacatatactacaccattaatatatggtcccacctctcatacacacacaacgtattggaatccgtggtgtagctggctataaatctatagcccgcttttccttctctttcttctcttctctcctccacgtgtgcttatagctaacttgcagcctgctattgtactcgctctaaatcaaactactgcaattgtaaatgaataaccgtgactgtaaatcagggcagtttgttttttttttaattccagccctttaggagtccagaggggattcagccttttctcccttctcaacagtgatcttggcgaccagatgctatgccaatgcgctggtggagatccagccagagatcactaagcaagcagtggcgcccttgtcattcccgagcaacaccggttgacttcatcttcaggcatcatggctgctgtctttgtgggcccccagcggcagcatgttgtcgtccgctacacattatatctggactgccaccctcctctgtggtccaacctccccagctgctctcccttctaccaccctagcttctgtgccttcactaccaagcccctctttgccccctagcactgcacctctactgctgaccattcccgagcgctctgccttttgtacctacgccgccaggtgacacgtggtgttccatttcactggctactctgcctgtgccactgcctctgctgccgagcgccacccgacactgcacctcgactgctaggaacggtgtggtgctccacctctgccatccccagcggcccttcgcttcaaggttctggctggtttgcatgggcatgggggaataaatgtgtttgctgtgaccgattgttcatttacaggttccccaccagaaacatcaagcaacacagtgaccctacaagatgtttagtgctttgtacattacagatcaagcttctgattgtaaaaagtgacagaatttatggttgatggatgtgttcagggtgcgttttaaggttgtgaggtatgcatttacattggaagaatgtgttcgtcatgtgtttgttggtttgtgggttttctacacttgcaaggtgagcatttattgtcttggagacatgtactttcacatgacctgttctcgtcggatttacactccgggggacgcgtttacagtcgtgggttgcgggatccctagaaatgggagatctagcaggtggggtgctattaccccccctggtcattagttagtgggactgattagaactgtgaaatttcatgccaccctgttgttatcaattctgtaaacatttaaacaagccataacaattactccctccgtttcataatgtaagactttatagcattgtccacattcatatatatgctaatgaatctagacacacatgtgtgtctagattcattagcatctatatgaatgtgggcaatgctagaaagtcttacattatgaaacggaggaagtattgttcttctcaaactgtctgttagaaaattttccacaagaccacttggaactaatatttcagatatttaatggccttttcattgcctattattttcatgtgtgtatattacatttctgagcatggaacttatatatagatctctgtacagtactttcctgagcagtattgtggctacaccttagtccttgccattgtatgcgttgtagaaatgctttctaactaggtaggctcttaatataatgctcagcagcaatttctgatttccatcatgtaaagtcttaactgaatctcgttatgttgatgaaccttttttctgttctcttcatgacaggtttggtttaatgcttttaattagtctgttatttactttttttagtcagcaattagtacaaatggcaggccatcctaagctggcatcgccattaacttcacttatttactatttgaggtaaagttgttcttttggtgcctttgactgaatgccaacttgagcctttcctgagctgggatagttgtgcccaaatggatatagtttggtatagtttttcatgtacaagaaaatggccacatagtatttcaaaataaataaattactgtttctgactttttaatcacaagttcactagttggctgagttttgtctgcctttgtttaagacaaggtcctagaagcaggtgcagtgagcatgctgcagcagcaccgatgtctggagtctgaggtctgatgctaacttctgtggacatatttagggagcaaaagcgaggcacacaaaagtccagcgaggagtaggcttcgtcaaaagtgcatccagttagtattagggaaggaaggtggcatgcaggaaacccaaagccatctagtggaggtggtctgctagcagaataggaaagatgagatgtatccatgttatggcagttagaattgaattcgtgggaggtgccatgtggatatagtttggtagtatggtaaaaggatgtctgctcctctatgttagttcactcaacagaagaatgattgatatttatatcctccttgtgctatcttgcaacttatcatctaattatctgtttctatttattaatgtgtctatctgccttatgtgcaacccttatgtcctttatgctgtccattcatcatctgtgcagtacttaatatttaaccatacatccagtagccttgttttcttttgctctgtttgatagtgcggtggctttcaaaactcttatttattcatttatttgtttatttatttttggattggatagtcagaatcatttgaattagagctgtaacagaataatcttacttgcattagtcaagatccctctaactagattcccacagcacaacacagcacagcaaccacaaactggccagtttacagtcagctgctttactggttgcacctacaatggacaaaggttggtcagtggaaactagcgtgtaaacaaatttgaaatctgcaaagattcttgattcaattaacatattgctagtttctgcataactaagattaattgcacttaaaattgtttgttctctttactagctgcatctatgcgatatcataatcattagacttagttctatagtgttctcattaactgataccatattgccattaatgtgttcaaatatacagatccagatcgacccaggaatgataaggcaactatccttagtgatgcaattcaaatgctgaaagatttgacgtcccaggtgaacaagcttaaagctgaatatacttcactctcagaagaagcacgtgaggtaaacttgtaatatgtgtataaacaagcaggtcagccacagctcacagaaatattcaaatatctaaataacgcttgtcatggtgcttgtagttgactcaggaaaagaatgagctcagagatgagaaagtttcactgaagtttgaggttgataatctgaatacccagtatcagcaacgaatgcgtgtgctgtacccttggactggaatggagccttctgttgtcattgggccacccctgccatatcctttttcagtcccagtcccagtcccagtccctataccttcaggtgctgttcctatgcacccacagctccaggcatacccttacttccgaaatcaaacttctggaaccgtctccaatccatgcacaccttacatggcatacactcaacccatccatcctcctactgatcaactatctaaccaattcagtgctccagttcagcattcaagtagtaatcgatctcactctatggcccaagactctagaagcaagtcctctgcactgcagcaagtaagttgtagagggaaacatgatgactttgatgacgttgcaactgatctggaactaaaaactcctggttcctcagcccctctacaatcagagattgccaacaaggtaagggtcatccaatattcagtttcactgtaaatgatcagcatgttttatccttgttcaaagtagatcaaagggagatgagtacttttttttttgggtgtttgtcattatcacaggattcctcttctgacttgaaaaaaaagcagcagttcatacaggaaactaaaggtagttctcttacagaaggcagtagtagttcaagcagatgctcgtccagtggtcctccagatgtctctaacagtattgaaggtggatcagttgctgatgatcaacgatcgacagtacagacatagactaatatatgacgtatagctatcttttccgacattcctaggcctgcatgtgtggtgtaatctgctggcacatcaacctttgctgcttagctgtgcccacttgatatcggaattgacaaattaggaggcctataggcaaagtagaactggttagtcgaagccaaagccatattccatggctatgattatgaatggtcggtagttacccacactcttctatggcagtttgaaatgctttcggcgactaggtatgcttgcgactaacttctgcggtttgtcatctaagatatgcgtcaagtgccaaccagatctgttgagatagttctatcctggagtagcattttctacgaatatatggtaaattaactagtgattaaccatagaatttatcatggttcaatagttacctggtagatcagctacaagttgtacatcatacactatattaccattaattggaatatgttcttaagtatattatttgacatgattgtcagtatccacattttactatatataggcggcatgttattgaaggtggtttgtttcgtgtggcatgttattgaaagcaaacaagtattctaggtcgagtgtaacatgcaaatatgcccttattttgtgaaggacatttttttttgtctatgtcaccacttcaattgtaactttggtttataccattgccttttggtatattcagtctatatcatccatatgtcaaaattcttcataaaatgtccgaactgccccgtaaccgtcatcagggagtgatctagagcatccctgccaaaacctggatccaacggcgctcactagggttcggccatcttaccttcttgagtaattggtaaatggaaagatattgattccagtccttcttgcttctctgtcagactcatgggatttttatgtattttcgcaaaccagctcttttcctcatattgactttctctcttgtctctcaaggatgtatattttcttttggatccttaccaaggcaaagtgtgctagaattcacccctattctaaggctgatatgtggagcttggtagggataaattgtgacatacctgcatcatatatattgcaaagccaaaaatacggactcaagaagatcatcagtcatactcctagatcaatggtctttatttgtgatggaaaaggaaaggaaaaatattttgtggaatgatggaataaagaaatgattatccctttttcctataccttctctccattttgttctcttggcatgaatatggaagggggcatggctatattttctttccaacattgctcaatattttgggagcaagctttatttccttcttctcccccccttttttttactcatagccatgcctttccctccttttctcattttctttttgccaagaacttttctacgagaagaaagcatagtctaatataggagtttatttgatggaatttttgtgagaagccgacttcccgtgtagaagcttagcttaattatatatgtggagaaatgaaaatggaaatgaccccttgatcatgagtgcatgaaagatatcaaacacgagtcacacaaatttgacaaagctcaatataatgtccaacaatcatatgcataataagtttgatcaaagatatacttgcatatggccttggtaggtataaaatgaagtcaattggaggattgagcttttaaaacaattttattttgaaaacaaattcccaagagtcataacaagagctgcaagaattcctttcatcttgaatcatctcccatgaagcaattacttagatgcataaggttccctaaacatggatggttgttcacaagcacaagtttagctgagaataatgaatatacaagattaatcatatgaagaatttcattagttggaaattttattttttacttatgcttgaaccaattgtttcctgaattttcagctctagtactaaaccatggtggagatatacagataatggatgtactcatctgcttacctgtgaaaaggattggggccagctttggtggccgaaccactcttgcgcctgatccctctgcaactttctgcagagttcagtgtttccaggtgtccagttatttcatcaactctcagagtatatgcacgtcagaagctgggatatctccctcacacttattcaaaacctgaactttattaaacatgaaacaaaaacaaacttggcatgcattggggttaacaccaatgagccacattattcatagcaagtgcttacttgattggaaaataaaaaccaagcacctactaccatttttttaggggaaaggagacatctaattagcataatatttattctccttccccatctctatgaatgcacgcttgattttagcgcacaaaccgcgactaagggtatcaaaattatttctaatttcagcgagttctacccctagctccgcattgcgatccctaagctctatgttctccttgcggagtttctttacttgaacggcgagcttatggatcgagggctccgacaactttacttcatcttcttgacattggccggctgcccttacaattggtgggggcgttaaatgacgcttcaccttcataggtggagggctacgggattccgctgccccctccttctccgatgccgtcaaaggccagagtaaacccttgccatacccaccgccgggagttcgcactccctgaatgtggaaccgatcctccttcggagtggatggagtagcggtgggtgttacatacttgtggagcacctcatcatttgccttggtgaacagggtgcccacatagcgctcggcgggaggcggagcggccttctcatcgtcttggaaaaggctccgcgccttcaatagaccgagttcaataggcaggcgaatccccccgaattttggtcttcgtaacatggcgaggggagagggatcatgctgccgaacggggggctgaacggggccgagaggggttggttcggccgaaccagggagctcgccgattggctccaaaatcgcaggggagcctggcatagctgcaaggggttgagcccatacagcgtttactccttccatcgtgtattcttccacccgaatgagttgattcgccagtgtaggttctccttcaagattgtaggtgttgtttgaggatgaaccaatgtaaggcatgagagatttgccagccatggatggtacaaggatttggatcaaagattttgaggatgaatgtgagattgaatggagaggctcttgcaaaggaggaagaaagagaggaactagctcaggggcgtgatctgatcgctctacctccaaactcgtatctaaacagactaaggatgagcgggggagactaccattcaaaaacggggccgaacaggcgccgccttggttcggccgaaccctggttggtccggcaggcctccattttctttcctaggcccactaattcctaagctaggcacaaaaaatgacaactatacagggttctaagcatgcaatagatgagatcatcatggtttataatcgataaattcaataacatccacttcatctaaagtttcatttggttcaaggaaaatctttaagcgttgaccgtttaccttgaatatattacctgagtcgtcgcggagtgtgattgccccgtgcgaagaggtgtcgatgatgtcaaatggtccttcacatttactgcgcaattttccgtgaccgaaaagcttaaccctggagttgaatattagcactttgtctcctggcttgaatttcttgatttttatccttttgtcacgccagcgctttgtcctttctttgtatatcttcgcgttgtggtaagccttctctctccactcttcaagttcagcaatttgcatttttctccattctcctgctccttcaaagtccatgttctagttcctgatggcccagtatgctctgtgctcgagttctacaggaagtcaacatgacttcccgtagactatctgataaggagacattccaatgggtgtcttgtatgctgtccggtatgcccacagtgcgtccggcaatctatccttccatcctgttcccattttgttgaccgtcttctaaagaatattcttgatttgtttgtttgatgtttctgcttgaccgctggtctgtggatggtaaggagtggtcacattgtgtttagctcccatctctcataggaggtctcggaaggttttgtcaataaagtgagaacctccgtcacttatgaccatcctaggggtaccaaatcttgggaagatgatttccgtgaacatcttattggcatgcttcgcatctgcggcactgcacggcatagcctcagcccacttggagacatagtcgactgccaccagaatgtactcgaagttgcgagacttagggaaaggtcccataaagtctataccccaaacatcgaatatctcgacttgcaaattgtatgtgaggggcattgcatcatgagcggcgattcctccttgcctctgccagcttgtgcatcttctaacgaattcttttgagtcttcgtacattgttggccagaagaagtcgttctgccaaatcttggcctgggtgcggaatgcaccataatggccaccgtaaggtgaggcatgacatcgctctatgatcttaagtccttcatcagtcggcacacatcttcgtagtaagccatcggagcaaacccgatataagtatgtctcatcccatatatgacggcgactttcgtatttcagcttccgttgattctcccctggtggtatgtacttggataccatgtaattcactatgttggcataccacgggttggagtcgcgaaccgtcatcagcatgtcatctctcaataactcatttatcggctgttcctgtgtgtcagtgatctatagcctagacaaatgatttgctatggaattttctactccctttttatccttatatacggtggcgctacatagcgccacacacaggcgctgcgcgccatggaactatatgatgcgacacacaaagcggtggagaaaaggtcgtaggtccgttcccccaccgccaatgatatggtgaataaaaatttaactcaagcatatgaagtgggagcaaaaaatcccagtggggatgtgggttataatttaactattacaaaatttgactcgtaactaactaccaaataaccgtagttatgatgtgagttataatttaactattgtaaattttgactcataactaacttccaaataactgtatttctctaagtacagtgccgtggagttgatatgtgcgttagttctttttagttaaaaattaacttaaaatggggagtcgtcattgaagtattttaaacaacagtgagtatgttttgtcatgatggttttggagtgctagcagtaaaattttaactcaggatatttttatcactttttggtgtgttcatagtaatatttttactcacatatatttacggtgcatacatcacagacaatcaagtttatttaatcatgcaaatcaatcgtattgtacacatcaaacgaacgcaagaaagtagacaggaaatacatactgggagagaggataatggaatcgctctacggatataaaatttacgcatcaaatgaacccaaaaaaatatatatacaggaaaacgttctttggacataggaggaacggcggcccgctgctctctcggcgaggtcgccgctggtcttgacatggtgttgaaagggtgagcacaaaaaagaagtgcttaaaacccgacaagcaaaaagcatgaacataggagagcaaggccgacaatcacacaacgatggagaagcctcgccgggggagttgaagcctgccttcgatagtgacgcccgccgattctggcatccggccaggcggcagcggcggtgaagccgtgggcggcctccttgcgtgcagccatggtagactcttggaggaggtggtcatgttggggtgatgacgacatgctcgttgacgatgtgagatccacactgatggcggagaggagcaccatcccctctcgctaggaattccagagcagctcgtcactcgcctacccagagaccaacgccgcccggtgatactgtgaactgaccttgcggaccagaacctagatacgccctccatttgctgcaccttcgcctcgtggcctcatcatcctgccctccctaactcactgccaccggcaccgggaacaggacgtcacctttgcgcagcaacgccgtcctcgctccggagggcagatcgagctgccgccctcaacacaacgacatgaccacaaaactagatcaagttgccagaaaccggatcctgcctccagccgcctcctccaccagatgcggggtgacggtatccactacgggcacctaaaaccggtacccttgctgcctcctcacatcatggtcgccgacgatgctctccacatggctgactttggatgcccgcaatctacaacaagagcaaccaacaaaatgtaagaagatgcaaacctgtttttcccctagtgagtagaaataacaaattggaagcgaacgaatggaataatccatccgtgaagaacacacacagatcgaaagaaacaaactcattcctccccatcagatccatcccatcttgctgctctagcatggacagcaaccaatggtagaaaagcagcggcggatgcaggcccagaggccctctatcgccatgggagccccgcagatcgagccgccgagaggccagtccatcctctcgtgtggatctagggtacaggatgagatgtcgccgtccagcttgaagccatcacccgtcgcttcctctgagaatcccaaaaggtggagtgtgtgtatcgaaggcttggcgtcgtggagccgggcgacgaggccggcagcggagatgcggatccagcatggccggcggagaggagtcaaaaaaataacatttgattcgtaaaaaaaaacatagacgtttaaattttacaaaaacataatgaaacagaataaaaataataataacaagaaaaattaaggcataagcaaaaaaaaagtttcctttagttaataaataactcaatatgctaagtcacgtttattatagttgctgaatcacatgtagttaaaatttaactgactaaacgtgaatatatatggtgggctatgtagtagtaaaaatttaactcgtgaatcaaagtgcgtggagtcgggaggggagtggggtgatgggcagtgggtgggtctgtgtgtcaggtgccgtttaatacgtagcaccttaaggtgccatatagtgtatatatatatatatatatatatatatatatatataatttctaagtcaaattcttggagcagcaaaatccatcttaagagacgcggtttagcatctttcttagtgagcaggtacttcaaagcagcatgatcagtatagactatcaccttagctcccaccaagtaagacctaaacttatcaatagcaaaaacaaccgcgagagctctttttcgatagtcgcataattcaactgacctcctgtcagagttttgctagcatagcagattggatgatgcttcttatccttggtttggcccaagaccgcaccatcggcgaaatcgcttgcatcagacatgatctcgaagggcagagtcgaatcaggaggttgaatgattggagcggagacgagtgcctttttgagaatttcaaaagatttcaggcacgcgtcatcgaacttaaagggcgcatccttggccagcagattggtaagaggtcgggcgattgtagaaaagtccttcatgaaccttctataaaagccgccgtgtcctaagaagctacagatccctttgatgtttacaggaggaggaagctgatctatagcatcaattttagcacgatcaactacgattcctcgtttggacactcgatggccaagaactatcctttcacggaccatgaaatggcacttttcccagttaagtaccacgtgcttctcttggcattgttgtaagactttgtctaaattctgcaaacaatgaccgaaggtctttccatagacagagaagtcatccatgaagacttccataatgtccttgttgacggtcattatcgaccagtttcgaccatcaatattaaccaaagtatgaagactagctatgcttgcaatgcacaaattccaaataaaatatctacttccactatatactttgctactaacatgtatgcaggagaagcacatataaatgaggagaatcgacagaaaatagacaaacgatcaattagatgctgtcgagaatcagacttatggatagatgggctaagaacttagaaaagtcatgatcaattaagcccaaaattccatgttttggaatgaggagccaacgagtcggcctgccaaaaattgggccatttgggccagatcatggttcagccgaacccccatcatagccattcaggctggggtttggcgtggacgctccggatgaactcctgatggcggttgcggggcatttccgacaattcccatgctctacaatcgccatacctgcctatataaggaggggcacactctcttctccaacacacactcaagcaaggatcaaagctctctacagagttagtattagtgttagtggagtagaagtagaatagttcgaagtccgcggaggcttcggggagttcggtaaaggttctatagcttttcctttcttctttgtaagacttccatttattaatataatattcttctttatacaagttcggtgctttattccaatcatagagtatgagtaccagtcttagtttattcataagtagtataatctgtgtagttaaaccttctgggatttgcgttgatgctgttataatgtctggttaccgggtcattagtctactctggctaggccgagagctatggcctagggactcagatgcaaagcaccgattgcaaggccgtagagtaataagtagtaacttaagcatggggtttaggttatcacttatcattatttggggtatattctctgtgtgatttgcaggccgctgatggtgacagctcagtacgggcgtctcccccgcagtttatattcctacatacaatttcctggggtcgtgagaaactcggcaacccggggtaactttgcgatgcatcgggagggcatagctatgcttaggcttagctatgctgcattgttaaaggggttatactacatagtgtatactagttagaatatactaagatgttgtatactagaagtataggaatagaacatatctaaactactaccatttagccataattaggagatgtaggaggtagctaaatccttagctgtgtgtcactctacccttaagcttaacttacccctgcatagaccttgatgtatacaagtaatatataaactgttagcatagtactttcttatcatatcttcccttgggataaaataaatacgataccttggaatactcctgggtgaaatgctgcaatggtatatccgtgcgcttgcggatcacatctgtaaccgtaatataccaggattatttctagtgctattgctgggaattatatttccaatagtatcgctaagaaataccaacagtcctcgattatgtccgagaaaatagacatcatacatctttggaaagatgcagaagcgttgcacagtccgaaggacatcctacggtatgcataggtgccgtatggacatgtgaacgtagtcttactctggtccttcggatggataggaatttgatgatacccggaatacccatcaaggaaacagaaaaaggaatgatttgccagccgttccaacatttcgtcaatgaagtagcgggaaatgatcctttttcgtagccttgttaagtttcctatagtcaatacacatcctccatctggttacggttcgttgcggcataagttcattttgagcatttgcaacgaccgtcattcctcccttctttggcacaacctggactgggctaacccactcactgtatgatatgggataaataatcccggtatgcaggagtttcaagacctctttctttacaacctctcgcattgcattattgagctgtcgttgaggttccctagacggagtactctcggggtcaatagtgatacgatgggtgcaaagtgcaggattaatctccctgagatcttgaagcgaatagccaagaacagaacgatgctttttcaacacgatgagaagacgttgagtctcgtcttcagagagcttttcactgattatgacaggagcttctttgtcattgtgtaggaaagcataacgtaggcctggaggtagaggcttaagctcaagcggaggtcgaggtggcagttccataattggcagatcgagagtctcactgggatctgcttcttccttgatgatatcggggacttcatcttccagaagggccttaggagactcgtgagggggaactgcggtaatctccttcgctgactcaatttctaggagagggttggtcaaggcaatccttgcccgcgagaatggaacggaaaattcattccctcccaacgttattttgaggctatctaatcggggtgtgttgatgagaagcaactcaatgggtagcccgattaggatgtcaaagtcttgaatttcaaagatgtggaaatccaatatcgcctccctgtcttcaaagcagacatgcacatcttgtacaatcccaaatccttcaatgatatttccgttcggatgcttaaagaatttgtctgtcgaggtcactgtcatatcgcttaaataagcgaatgcaaaagactcggagatgagattggccccgacagttggactgtagagaatactaacgttgttcccttccagatggcaaggaatgattcggagagcggtatttatccgaattacttcggatgaaagttctgcctcccttagccattcgttgctcattatggatgttaactcccgaacagtttcccgtaggaacccaagttccataggatcaggaggcggcaaaggaacgagtggtttcttcttgctaaaatagttcagggtgttaccatagtcttggtcaaaaccatccctgaacagaatagtggcacgatccagagtctgaatttcttcattctcgacagacggttgttcaggaaacttctcatcaatagagctagcagaagtggatggttcagagagtggctcgatcattagaggttcctctatcttggacacggatgcctccggctggggttcatcgtgttgcatcatgaagatgatccaaaattgttcttccttccgacggcgttttgtgcatgaacgatcccccggcggttatgtccagatagaatgcaaactccttatccagacccatatggaaatgttggagtaacacgtactcgggacaatgttagatgaatacaagacatcggaccgcttttgggccgaagccgtcaacaccgcatgccacgccatcaaccgcctctatcttcaccgccttcttaagaagactccctatgagcttcttatcggtaacaaaccaaatgtctcttactttcgtgttttcggtagtaagtgctacattcttactaagaaggctagatcctcaaagtttgctcctaaagtggatgaggggttcttgcttgggtatgggtcaaatgaatgtgcataccgcgttttcaataaaacctctggtattgttgggatcgcgcgtgatgtgacatttgacgaaactaacggctctcaagtagagcaagttgactcacatgtgttaggtgaagaggaggacccgagcgtagcaatcaagaggttggctcttggggacgtacgtcctagggagccacaacagggggcctcttcctcagcacaagtggagccacctacatcgacccaagccgacgatccctcttcttcaagcttggatcgaggcgaagaaggcgagcatgtgtcaccctaaccgatcaatctagctcgcccaagaatccaccaaagtatccaaagagatcacccccccgacaacatcttaggagacatcaacaagggagtatccactcgttctcgtattgcaattttttgtgagcattacttgtttgtgtcttctcttgagcctctaagggtggaagaagctcttaatgatctggattgggtgatagtgatgcaagaggagttgaacaacttcacccagaatgaagtgtggactttggtggagcgacctcggcaaaatgtgattggcacgaagtggatcttctagaacaagcaagatgaggccagcattgtaatgaggcaaggttagtggcacaagggtttacccaaatcgatggattagatttcggtgaaacttttgtgccggtagctagacttgagtcaatttgcatattgcttgcttttgctactaacctcaattttaagctatatcaaatagatgtgaaaaagcgccttcctcaacgggcctatcaacgagttggtatacgtggagcaaccactgggcttcgaggatccgaagtatcccaaccacgtgtacaagttccacaaggcgctctacgggctctagtaggatgatgaccaagcgttttgagatgtccatgatgggtgaattgaagttcttcctcggccttcaaatcaagcaactaaaggaaggaactttcatttgccaaacaaagtacttgaaggacatgctcaagaagtttggaatggagaacgccaagccaatccacactcccatgccatcaaattgtcacctcgacctcaatgagcaaggtaaagacgtcgaccaaaaggtataccgttgtcacgtcctgataaattcatcccgaaattaaaaatcattcgctaaaaggaataatagaattaattaaaattcggaaagaaattggcaaacactaaaatacgtacaagaaaaattcgaatgtggcccggagaatttttgttaaattctccttggtctaaaaaggagccctcaaattttacttgaattttcagagcaccggaaatatttattaagcaacaaaaacaattattagagtttattaaaaagaaaaacctaaaaataaccccctctttccctttgggccaagtttggcccaaagtcctctctctctctctctctcggcccgcggccgaagtccctctttcctccctctttttctctccctctccctccccctcccctctctctcgggccgttcctccctcccctcccggcctgcccggcccaggccgccctgccccctcccgcctgggccgcgtcccggcccaagccgcgccacccagccaccccctgcccgagccagccgcgtgcgcacgcgcgccgcacgcgcgctgacgccgcgcgcccgcgtggggcccacgcgccaggcgcttcgtcctcctcccgcccggcctccttcctctctctctctcccgtgcgaaccctagcgccattcctccctcaaatccgcgcgattcaagcatgggattcccaaattgattagggggaattaatcccctttccctcctctctctttcccccttaattccccctagaatggcgcccccaatcgccgggaacggacgcaccaagtccggccgctttccatggccgtcggccgtcattcccgtcgccgttccgccctctcccgtgcccggctccctcccccatcctataaaatagaaccccctctttgcgttctaccgttttagtctcctcccgagctctcccgtggtccctagccacctccccgccgtcgtcccctctctcccgtgccgccggccgtcttcagccgcccctgccgccgcgttagcacgtcggccggccgtgccgtcgcctcctccagcatcgcagccgcctcctcttcgccggcttgccctccgtttcccgcggagacccccggagctacgttcccgccgtcgcccttctctttccttcgcgccggccgcctccagccgcctctccctcctcgccctagcgccgcccggccgcgccgtcttctccctcggcctcacagccgcctcctctccctcggtcagccctccgtttcgcagggaaaccaccggagacgcgccctcgccggcaaaacagtggcgttgccgccactgtaccgccttcagtcgccccggtcgccgcgccagagcgtcggccgacgtcgccgtctcctccctcggcgtcgccgcatcgccctccaccccggcctgccctcggtttcgccggaacgtcgccgcgaacctctccgtccgcctcaccggagttgttcggccacccgtccctcctcacccgtgcaccggtcggccgcacctccaccaccttcggcatcgcagccgcgacgtcgtcctcggcatcgcttccccttcggccgaacaccgccggtgtccgtcgtcgtcttcaccgttcatcctcgccggctcgtcgtctcgcggcgccgcctccgtcgtcggcatcgcagcggcgtgttcctcgccatcctcgcctccgtgcagccgctgccggctgccctcgtcgtctcctcgccggccccggtcgtcgtagtcgtcgtcctcccgtcgttcccggtcgtcgtggcgttcgtccctccgtcaagccgttctcgtccgtcgtccgcgttcgtccagtgtgccgctgcagcccccgtcgtcgtcttcgtcctcggctccgtgtcgtcaagcctcgtgccggccgcgtctcgcctacgtccaaggatcgccgccgaagtcgttccctcgccgtccgtctccgccgcgccagttcgtcgttgtcgttccctcgcctcgtcgcgtggtggtaaggatctctcctctcgctgccccgtcctcgtcctttcggtgtcgccccgtacccgttgtgcggtcgtcgaccccggtacccgtgtaccggtgtcggtagtcgttcacgtgtgcgggtggtgaccgtgtagtgtccgtgttagtgtgttcgctcggtagccgcgtggtttccacgtgtgcagcccgcgtggtgtctagtggagtccgtttgtcagctactcgcctcggttgacacacggggtccgcttccgtcgacccgtggaccgcctctgtgtacccggtctaccgcggtcctttaggttgacatgtggggtccgcatgtcaacggcgcagccttcctgtcttttccaggctagcgcttacacctgttttatagttgcaaagcttaattataataatccgcaaatctccatataacagcattaaacttcggatgatcatatcttggtcatacccgctccgaatcgacccgttcaagtctcttaatgtttgttataacctaaagaaccctgtgctttctttttatgtattgttattgcttctttataggcttgtagctttgcttgtgtgcttcgcgtagctttcgtcgttccggaggttcccgaagcgtggttcgtggtcgtcgccgaaggttcggaaggccgttctctctgagcaaggcaagtcacatcatccttgaacatattgagtcccagtttataaaattatgttgatttaaattattgcattatcgctttatttaaattcccgcgttatcactgttttatctagccatgcctatttacctttgttatgaccttattattgctattgttattattaccttgttcaccctaggaaaacaaaaccccaactagtgggtactctattcatggttccactagtatgaatttaggtagatgcttcgctgattaataggacaacactaggtggtttttataactttagactttgggaattctcatatcatttggacactatggaatggttggcttatggtggaattggacatacacctctcttcctctttcaaaacccctaaaacctgtttttcggtggggtttgggtgcatgctagttgtgggaagtagcaccccggccactataaggattaagctcgggcctctgttgcaaagcactaccgtacttccacatgtctagtgggtaaggcttagtttgtggctcagtctggttataaacaaaagtacacggatggagatggacaaagtcgggggtcgatggacatctctaggacaaatgaaggctacacgagctgcggcccggtagtcgagatgtcatggcacagggccggtgtcctgctgctagggggctcaatcctgcctgcctgtcccgggggttccggccgtaggtggggttgggtcggtactcttgtctatggctaggatgggttggaaactatgtcacgtcttccgtccgtataccgtggtggtatgtggcacgtggttacacgtgaggaagatgtgtcttgtgggtaaagatgtacacctctgatcagagtataatctattcgaatagccgcgcccttggttatgggcaagccgagaaatgtacccaagtcagtgttttaattcttaaaatttgcttaacaactaaaatgtggaatggttggcctgggttggcttgggacgagctgggacccagggtcgggttgccagttcggtctgaatcatcgtaggccttgggttaaggcaggttcgtgagggttcacgaccttgattaataatactgtgtagctttaggatcgtctttttaaaatggctttgggcaactaagtgacttttaaatgctgttttctgcaaaacttaacccctatatcattaccccttgtacccccttgcattaatcgtgcatccgccggtgtggcttgctgagtactgtggttgtactcattcttgctctatctttctccccccttcagtaagagaagctttggagaagaagtcttaggtggagtcttggcttataccccagttgagcgcctgtgaagatggagccgtaggcccgctagtccgctgctgtttatttttgattgtcaggccttaagtgcctttgtaataatgtaaatattatcgatataataaagatgtgtcttttatatcatgtttgtatggtgtaccccggcttttcctgggacggggattaatacactagcgttcgggaaaatgcaattttctcggtcgcgacaagctggtatcagagccatctcgactgtaggataagccaagtggataaaacctaaggacatattttgtaaatgaaactatttgcgaaagttcctgtttcctcctttccctaatgctatttgcaaaatgtttattctcttcttcctccttcggattttcaactagtactagatggtcagctttgcgaagaagaagatgtcgtcaattgtctgccgaagctccggaagactgcaggatccgctagcgaagtggaggaagcagtgaagccagctgtgaaggagtgaagatcttggagaacccgtcgcagaacctaagccaccctctagtgtttcgtttgtcgtgtgtttccttgcttgtgtgtgtagcgcgtggtttgcatcggtgggttgtgatgtaaccatgctaggttgtttgcttaatcaacttgcagaataagtgaaacaaacaacacatcaacaagaagagttagttcctttaaggtcctgtctctagttctggtctattctttcctagcttgtttcctctctcacctcaatccctgtaacagatgtttaacagagaaaaaggaaagaatgtcagagggtatgcctccagtaactcaagttttcaactcaatccaccactagcctcaagagagttaacaagggcacacccttggtccattccaagcatgctgcttagttcacagctaccattggttggaagtcaagaccaaaatcagtgtgtgtttgatcgagcatttgccacccaggtcaatgagcttccaatgccagaagagcatgtccccttttgtcatgattgtagagaacaaggacactatgccctgaattgtccatgggtatatgccaaagaagccccttcctttggtttagcagggcagacatcgctaaaccagcctcctcgcaccaagtcaagcttgcagcctagtgtacaaaggagagagcccattggagagaatccattgaatcccgggaaatgctttcctcctagcctttcgtaccacgtggggtcacgtactaagcaagccaaaggcaagaagagtaagaatcagaagagaaaagcaccgatgcgaactgaagaagaagtacgtaagatgactattaccagcaccgaatggcctccagctgggataactattcctagacgtcaaagaggaaatactttccgaggtgcacgacagttgacccagcacctcctaagccatggtggcagagtatctgatagtgaagggtcagatcaagtctcctcggattatgaagatgagtctccccgacatctcggcgaggaagagatggaatcaaaagcatgcccccgttgtggagaaattggacatgttgctagcatgtgtttcacactctgccctcattgtgaggaagaccatccaccaggtgaatgtcccacccgcaaggtcacatgttttctgtgcgaaggtacaaaccatgtgcccaaggattgccaactcagtgtgttgttgaccaagaccgcagaaatccaacgaacaaccctacgattgtctcgtcagttagtcagctccaacagcaacatcgacgatatcatccacagcaccaatgctcctcttgctgcacctgactctgcaataaatcatagcaataataccttcagcaccaaccattctctgcaccgacggcctcagcaaagaattgtcgtcgatggaagaagttgtgtctctccccgacctactccaggccgagcgaagggcaatcaacctcaggaggatgataccaagcagaagaccgttattcgcttcaaccagcaatcagaaggaagcttctcctgtgaatgatagcaatatgcagtcctatcacatcatcacagaaccaatcaaggatgcagtcactagaacaatgccagctatatctctccagaatcaaaatgagcagccatgtttgtggttttcagttcgctacttatcattgtgtaatcgaaagtttgcagcaatcatgtaatacataaatatattcatgtctataaacagtgagcttgctatgcttatggatgattcatgttgaggatacaatgtaccgatgttaagcaccttccctttttgtttaaggcagtgcctcgtattcatgtaatatgggaaaaatgtgtaataaaaacaagttctatgaggactctttcagaagatgctgatatgggattatgtgtataattgtttactgtcaaaggagacctagggtctcatttcagaggaactatgttctaacctcgagttaataaccaacctgatgatggaaaaggaaatcaagcgattaaccaaagagacatttgtttggactaagagtttcagatgtgtctttttcggatcaaaggtaatggcagtcagtatagcttttggcgaaacacttcaaggattcactgaaaggcagcagaccaaaggacctcatcgccaccagaagtgtccgcaacccacattaaagagtaccacctgttagagataggccgaaagatgattgataaaagagattggcaaagaggttctctagcaggaaagatgtaggccgaaaggtgattgataaaggataatcaaaaacatgctctgcatcactcaaggaagacccctgatagtaatcgccctgcaacagtcaccttgtcattgagagaaaaaaaaaagtcgtgagtaagcaagatgacctaggtaaaagtgtttctatgaaggcaaggagtgaaatcttcaactcagtatcagatgctacacggagtgaaaactgcaagcaccggttaccaggcaatgccatgtcttgggagatgatccaatgggaaggaactcatcaaggtcaaaggagtaaaggaatacgttgaatgctaaataatgacaacctgaagataatagtgggaagtaaactgaatgtaaagaaccaagtgatatgttcgaagatagtctacagaggtcagattaaaatcacatctaacaacgaagcttcagatttggcaggataacgatcaaacaataagaagttcagcagtaaagtcatttgggaagacgtcaaagcatgtcaagtgggataatttggttcccttgggaaacataattcaaatgcaaagttatcgaccctcacattgaatagaggaaatatctagcaccggagaccaggaaagctaatatgagacaattagtggcaagttgtcaatcatggtattcttagtaagcgggatatcatagtctaaagcatatggtggtaagttagaagtaaatgacaagcatggtattctcatgatgacaagcatggtatcctagtaatgacaagctgatatcaacgcaaaacgtgaagtgggtaacttgtatgaggttgacgccaaagatatgaattatgagaagttctggaactgaagccccatcttccaatgccgcagcccagtcgaagtcagctagaggtgcaaccagggaaaagtcatgtgaagagaagattccatctataacaggagatcgagccaagcagtccagagtggagaggttttgctaggcaagattgttatagaagacgcgacggaagaagtcagacaagaagagaagaccgcccaacctatcttcttgctagcctcctcgaatctcggggacgagattcttgtaaggggggtggatttgtcacgtcctgataaattcatcccgaaattaaaaatcattcgctaaaaggaataatagaattaattaaaattcggaaagaaattggcaaacactaaaatacgtacaagaaaaattcgaatgtggcccggagaatttttgttaaattctccttggtctaaaaaggagccctcaaattttacttgaattttcagagcaccggaaatatttattaagcaacaaaaataattatcagagtttattaaaaagaaaaacctaaaaataaccccctctttccctttgggccaagtttggcccaaagtcctctctctctctctctcggcccgcggccgaagtccctctttcctccctctttttctctccctctccctccccctcccctctctctctcgggccgttcctccctcccctcccggcctgcccggcccaggccgccctgccccctcccgcctgggccgcgtcccggcccaagccgcgccacccagccaccccctgcccgagccagccgcgtgcgcacgcgcgccgcacgcgcgctgacgccgcgcgcccgcgtggggcccacgcgccaggcgcttcgtcctcctcccgcccggcctccttcctctctctctctcccgtgcgaaccctagcgccattcctccctcaaatccgcgcgattcaagcatgggattcccaaattgattagggggaattaatcccctttccctcctctctctttcccccttaattcccccttgaatggcgcccccaatcgccgggaacggacgcgccaagtccggccgctttccatggccgtcggccgtcattcccgtcgccgttccgccctctcccgtgcccggctccctcccccatcctataaaatagaaccccctctttgcgttctaccgttttagtctcctcccgagctctcccgtggtccctagccacctccccgccgtcgtcccctctctcccgtgccgccggccatcttcagccgcccctgccgccgcgttagcacgtcggccggccgtgccgtcgcctcctccagcatcgcagccgcctcctcttcgccggcttgccctccgtttcccgcggagacccccggagctacgttcccgccgtcgcccttctctttccttcgcgccggccgcctccagccgcctctccctcctcgcccgagcgccgcccggccgcgccgtcttctccctcggcctcgcagccgcctcctctccctcggtcagccctccgtttcgcggggaaaccaccggagacgcgccctcgccggcaaaacagtggcgttgccgccactgtaccgccttcagtcgccccggtcgccgcgccagagcgtcggccgatgtcgccgtctcctccctcggcgtcgccacatcgccctccaccccggcctgccctcggtttcgccggaacgtcgccgcgaacctctccgtccgcctcaccggagttgttcggccgcccgtccctcctcacccgtgcaccggtcagccgcacctccaccaccttcggcatcgcagccgcgacgtcgtcctcggcatcgcttccccttcggccgaacaccgccggtgtccgtcgtcgtcttcaccgttcatcctcgccggctcgtcgtctcgcggcgccgcctccgtcgtcggcatcgcagcggcgtgttcctcgccatcctcgcctccgtgcagccgctaccggctgccctcgtcgtctcctcgccggccccggtcgtcgtcgtcgtcatcctcccgtcgttcccggtcgtcgtggcgttcgtccctccgtcaagccgttctcgtccgtcgtccgcgttcgtccagtgtgccgctgcagcccccgtcgtcgtcttcgtcctcggctccgtgtcgtcaagcctcgtgccggccgcgtctcgccttcgtccaaggatcgccgccgaagtcgttccctcgctgtccgtctccgccgcgccagttcgtcgttgtcgttccctcgcctcgtcgcgtggtggtaaggatctctcctctcgctgccccgtcctcgtcctttcggtgtcgccccgtacccgttgtgcggtcgtcgaccccggtacccatgtaccggtgtcggtagtcgttcacgtgtgcgggtggtgaccgtgtagtgtccgtgttagtgtgttcgctcggtagccgcgtggtttccacgtgtgcagcccgcgtggtgtctagtggagtccgtttgtcagctactcgcctcggttgacacacggggtccgcttccgtcgacccgtggaccgcctctgtgtacccggtctaccgcggtcctttaggttgacatgtggggtccgcatgtcaacggcgcagccttcctgtcttttccaggctagcgcttacacctgttttatagttgcaaagcttaattataataatccgcaaatctccatataacagcattaaacttcggatgatcatatcttggtcatacccgctccgaaccgacccgttcaagtctcttaatgtttgttataacctaaagaaccctgtgctttctttttatgtattgttattgcttctttataggcttgtagctttgcttgtgtgcttcgcgtagctttcgtcgttccggaggttcccgaagcgtggttcgtggtcgtcgccgaaggttcggaaggccgttctctctgagcaaggcaagtcacatcatccttgaacatattgagtcccagtttataaaattatgttgatttaaatattgcattatcgctttatttaaattcccgcgttatcactgttttatctagccatgcctatttacctttgttatgaccttattattgctattgttattattaccttgttcaccctaggaaaacaaaaccccaactagtgggtactcttttcatggttccactagtatgaatttaggtagatgcttcgctgattaataggacaacactaggtggtttttataactttagactttgggaattctcatatcatttggacactatggaatggttggcttatggtggaattggacatacacctctcttcctctttcaaaacccctaaaacctgttttccggtggggtttgggtgcatgctagttgtgggaagtagcaccccggccactataaggattaagctcgggcctctgttgcaaagcactaccgtacttccacatgtctagtgggtaaggcttagtttgtggctcagtctggttataaacaaaagtacacggatggagatggacgaagtcgggggtcgatggacatctctaggacaaatgaaggctacacgagttgcggcccggtagtcgagatgtcatggcacagggccggtgtcctgctgctagggggctcaatcctgcctgcctgtcccgtgggttccggtcgtaggtggggttgggtcggtactcttgtctatggctaggatgggttggaaactatgtcacgtcttccgtccgtataccgtggtggtatgtggcacgtggttacacgtgaggaagatgtgtcttgtgggtaaagatgtacacctctgatcagagtataatctattcgaatagccgcgccctcggttatgggcaagccgagcaatgtacccaagtcagtgttttaattcttaaaatttgcttaacaactaaaatgtggaatggttggcctgggttggcttgggacgagctgggacccagggtcgggttgccagttcggtctgaatcatcgtaggccttgggttaaggcaggttcgtgagggttcacgaccttgattaataatactgtgtagctttaggatcgtctttttaaaatggctttgggcaactaagtgacttttaaatgctgttttctgcaaaacttaacccctatatcattaccccttgtacccccttgcattaatcgtgcatccgccggtgtggcttgctgagtactgtggttgtactcattcttgctctatctttctccccccttcagtaagagaagctttggagaagaagtcttaggtggagtcttggcttataccccagttgagcgcctgtgaagatggagccgtaggcccgctagtccgctgctgtttatttttgattgtcaggccttaagtgcctttgtaataatgtaaatattatcgatataataaagatgtgtcttttatatcatgtttgtatggtgtaccccggcttttcctgggacggggattaatacactagcgttcgggaaaatgcaattttctcggtcgcgacaaccgttccatcattggctcactcctttacctttgtgcatctaggcattatgcttagtgtgtgcatgtctgcaagatttcaagacgctccgaaggagtgtaaacttgtggctgtgaagagatatttagtgcacacacctaaccttggtctttggtatctgttgacggtcgttatcgatcagtttcgaccgtcaatattaccgaaatagaggagaactagtaatgcttgcaaagcataaatatgttataataataatattccactagtattaggttcactaaccttttgcagagaataatcataaagtggaggagaatcgatatcaactcggacgataaatcaatcggacgatgtcgagaatcagacttatgtatgaatgggccaagaactcagaattgacacaatgaattgggccaaaattcacaagtctacgaagagaagcaacagaggaggccgccagccaaaccatgggctggttaggccggccctaggttcggccgaaccctcctcagcgccatccgatccaggtctttgcctagacggtgtgaattagcccccaatgacagttggagggtatttccgaccattccaaccatcacaaccatcattgggaggctataaaaggaattgccattctcacttcactcacacacctcaagcaagagctctctcatattctctcaagttaatttagtgttatcaagctagtggaataggaatagagtagaaattaggagttcggaaaccttcagaagagtttgggtatggctctaggagctttcctttcctcttttgtaagctttgtactatattagaatactcttctatatacatttattgtactgaaatactttccgggtatatgaatgccaactttacattatgttcatgttatactgaatatgctgctagcttatctgggagatgctttggtgcgggtaaaatgtttgcttatgcaattactctatgtcatgacgatgatattagagtagtatctggtagtttagacgtggtgtctagattacgggatatcattatttggggttatatgctgcggatgagaggtgggccgctgatggtgacagctcagtacgggtattcctccgcgcatatatataatcctaagttaattccctggggagggtactcctccgtatttagccccggttatatggtcatgatgggatgtcgtaaggaactcggcagttaggggtggctactcgaagtactaggagagcatcagatagagggtattagctagtatatcgaataactagaatgtatgtaaactatgtataccagaagtataggaatagattatctttctcttttctttccacttagcttagataatttagtatgagaatgagtagcttaatgcttgtgtgtcactctacccttgaattatcttaacctcctgcttaggctatgattattacaagtaatatataaattattagtcaagttctctctacatgatcttcccacgggataaaataaatacgataccattggaatactctcgggtgaaatgctacaatggtatatccatgcgcttgcggatgaattatgtaaccataatataccaggagtatttctgtgccattgctgggaaattatatttctggtaatgtcgttaagaaataccaacaagcatttctggcgtcgctgccggggaagattcataatagagattacctaaactaatattttatatttacctctgtataatcattttcctttaaaagctaaccttgattgttttcacttttgttgtgaaaacagggtactgcatgactagtttcaatttgccagaaaacttcaaagaaaatctagaagcttcttccggagcgttacgccgcgagtcgttgctccgcagaaaactctaccgacaaagaaaccagccataccagcgccaccgacctttaagactatggctgacaagacccttcgtgagttcgctgctccttctgctaacaatgtggccattgggccgcagatcaacatgggagacgtggatttcgacttgaagtccagcctcatcactatggcgcaggctagcccgttctgcggcaagcctaacgaggatgccaacactcatttgcagcagttcttggagatctgtagcacatacactataaagggtgtcagtccagacaccgttaggcttaggttgtttccgttttccctccttgggagagcgaaacagtggttttatgccaaccgtgctgctgtcaacacctaggacaaatgctctacggcattccactccaagttcttcccgatgggcaaaaccaatgcccttcgtggaagtatttcaagttccagcaaacaagggacgagtccattccggaagcatgggaacgacttcaggagtacgtggccgcctgtcctcatcatgggatggacgactagctaatcctgcagaacttttacaatggactcacgcccatatcccgcgatcacctggacgcggcagctggcagagcatttttctctaagacggttcgaggagccattgatctaatagagaaaatggtctccaatatgggttggagcgaggaacgactccagacttgtcagcgaggtatgcacaccatcaaggtatcacgcccggaatttctatccaaaattccaaacgcttacatgtgtgtgaaccctcgtccaggaatcagccgagacacacaataacaaattgataatagagtacaattattactctaattaataggcgaataaaatgtcattacagaggtagatagttcctctcaatcaataaagatctaagcagcggaaaataaaataaacggcgcagatggctccactccacaagcagcttgaccaaggctacacctaatcctccacaccatcagcatcattgtagaactcttcctctgatgaatgattgcaaggtgagtatatgacatactcagcaagccacgcagcaaatatgcaagtgcacaggataacaaaggatggcatagtagggtttcatctttttgcaaaagcagcattcagcaaacatttgagaatttaataaaacagttaagtattaaacaatattaacccaacgctatacaacataccctgttgcataggcccaaccattctgaacaaccatcccggctgcacagttctatctccaaaccaggaatataccattccaaaccaggagctaatcaaattattaccaattatagcatcatttactatggtgagaagtgtgagactaatcacgaaagacattgttagacccgcctataaccgcgggcacggctattcgaatagttttactctgatcagaggtgtaccactgtacccacaagacacaaccccacatcatgtcaccatgtgcctcaataccaccacggtacctcggaaaggagttgtgacaataccccttgcataacacaatccactacagcgcacctttcctggatcataatcacccccttataaacaaggcatggactccccagcgacccccgtgggcttatctccgccacttctcagtctgttgctccgcaatgaaccatgctatacaaaagataaagccgttgcccacgctggcttgtggttggcacggttaatgtttcacaaccgaaactcgtgaaccggtccttaattgtcatgagcacgaccatcaaaaccatgtgctcacaacccaccattatcaggttttagttggcaagtaattaattaaccagtcacgattgaccatcgtgaacaatcattaagccatcattaaaataatagtgagtcataagttatcccaatagtgtgctaatgtttctaagcatggataagcaatcacatctaatatctagctgaaccaatatataaagctcaactagtcaagttataataacccaaggtatcaaggaataaagtaaccaagaacaaaagggctatcacaaagaataggttaattccacccaatgacattcgaaaataaatgcaatagttgaatagaaacaatagctttaaacgggatcaacatgctcaaagggttgtttgggatctgtgtgacttgccttgctggccttggaactcttcaaactcttctcctgcgaaaacggactctccggaaacgacggaatctaaacagaaaagagcaaaatcaccaaaacagcacataaacaagcatgaacagtccatgtggatatttttaacatgtagatctcaattttagaaaaatttagagacttgaaccaactaaatcggagctaagatgaattagttatgaatttttgaagattaaatcggattaaaacacttatattgattttaattgaattatgacgcaataatgaattatttttgaaaaggaaaaagagatttattgcgtcagtgggctagggtttcggtggaccgggcgcacggcggcggttcacacgaacggacggccgagatcgacttgatccaaaacggacggccgagatcgaacggtccacgaccggctcacggggaagggcgacgatgacgtcggcgatgacgtcaccaccggcgacggcggctcggcggctcgggcgcgcatgctcgccggcgaacggctgcactacggcacgaacggagggcaccaacgggtagagggcgacgcggcgaactcaccggcgaccaaaaaggcggcggaagagcaacggacagcgacggcgacgaggttgaaacggcggcggagatcgggtcgacggtgacggcggtgctccggcgatcttcggcggcggtgaagcggcggacgaggacggcggcgacttgacgatcacgacggcgaccttcccgagcgacggcgacggctgaaacgacggcggcgcacggctggagcggcggcgaagacggcggctcgaagctacacggcgctagggcactacggacgacgagaggcgaaggcgaaggtggcgacgggtagaggagagctcggggaaccttttaaaggggctaggaggcgacggcgaaggcccacggcggccggcgacgggaaggaaagatcggggtttgaaggaaagagaccgatccgaatcgaacttgattccacgaacttccaaaacgaattagccgacgtttccaaaggggaaaaggtagaggagatcccaaagattgtttcccctcaatcaatttcaccggaaacggaaaggagcggccggattttggaaggaaacggcggcggcgcgaaactagggtttcgggcggcggcggccggaggttgacgacgaccctgacaggtgggccccacatgtcagcgggtggacgcgcgcgcgcggcggcggactgggccggactgggccgaggagagagagaagggttttgggccgactttcggcccaaagccaaaagaagactttttaaaacctttttcaatttaaattatttgtgaaatgcaattccatttattaaaaatacttccttagctcaaataaatcccagaaaaatctaggaattatagaattaagcaaagtatttaatgaaattttatctggccccattttataatggaatttattaattaaaattagatcttctcttctaggcttttaaaataaattctaaaaattccaattaaacaacaatttatatattttgaatttttagggtgtgacaaacctaccccccttaaacagaatctcgtcctcgagattcggaagaactggcgaacagatgcggatgagctgacttcaattcatcttctcgttcccaagttgattcttcttccgagtgattactccattggactttgcaaaaacggataactcgatttctggttcttctctcatctatttccaaaatacggattggtttctcaacataggtcagatcctcttggacttctatctgttcaagattagcttcttcggtaggtacccttaaacactttttcagttgcgacacatggaacacattatggactcctgccaaatattgaggtaattccaactgataagcaacctctcctcttctactgacaatcttataaggtcccacaaaacgtggtgccaattttcctttggtatgaaaacgatgaacccctcgaaaaggcgtgacacgaaaatacacataatctccttcttcaaaactcaaatctctgtggcgattgtcggcataactcttatgtcgagactgagccactcgcaatctttcttgaatgattttcaccttttcttctgcttcccttaggatattcgtcccgaaaacctgacgttctcccgtttgatcccacaaaagcggagtgcggcacttccgaccatacagtgcttcgtaaggagccatctgaagactagcttgataactgttgttatacgaaaattctgcataaggtagattcttatcccaacttccaccgaaatctaaagcacaagctctcaacatgtcttccaaaatctgatttaccctttcggtttgtccgtctgtctgcggatgataagcagtactaaagttcagcttagaacccatctcttcctgaaacttcttccaaaaatttgaagtaaactgactgcctcgaccagacactattttcttagggacgccatgcaaacacacaatcctggccatatacaattccgctaaccgacttccagaataggttgtctttactgggatgaaatgagccactttggtaagtctgtcgactatcacccaaatagagtcatgacctgatgacgttctgggtaaaccagtgataaaatccataccgatttcttctcatttccattcaggaatcttcaaaggctgcaacaaaccggcgggtttctggtgttctgccttgactcgctgacaaacatcacatactgctacgtattctgcgatttcacgcttcatacttgcccaccaaaatctttccttgagatcctggtacattttggtactaccagggtgaatggagtataaagtatcatgagcctctttcagaattgcatcttttaaatctttgttgtcggggacgcagattctctcacccaaccatacagttccttgctcatcttccaagaaaccaatagcttttcctcttctcatattcttcttgatttcttgaatatcaggatcattaatttgggcttctctaacttgatcaattagagtgggcttcacttctaaggctgccacgaaacctctactgacaattcccaaatttaatctttcaaattccttgcataattccaatggcaactgtcgtccttccgtagcattgcaatagcctttcctgctaagagcgtctgctacaacattagcctttcccgggtgataatgaattcccatgtcataatccttaattaattccaaccatctcctttgtctcatgttcagatccggctgagtaaagatatactttaaactcttgtgatcggtatatacctctgtacgagtaccaaaaagataatgacgccaaattttcaacgcatgaactactgcagctaactcaagatcatgagtagggtagttcttcttatgcggacgtaactgacgagatgcataggcaaccaccttcccatcttgcatcagaacacaacctaacccaagtttggatgcatcgcaatatacttggaaacccttctttggatcaggcaaaatcaaaataggagctgatatcaagcgattcttcaactcttgaaaactctgctcacattcttctgaccacttgtacttcacatctttctgaagcaatcgtgtcatgggcttagcaatcttggaaaaattctctataaacctccgataatatcctgcgaggcctaagaaactgcgaatctctgaaactgtctttggttgtttccagttggttacggattccacattactagaatcgacggcaactcctccggctgagatgacgtgaccaagaaacttcacttcagacaaccaaaattcacacttgctaaacttagcatacaactgatgttctcgtagcttctccaatgcaaggcgaagatgttcttcatgctcttctttggttcgggaatagataagaatatcatcaataaagaccaccacgaacttgtctaggtattccataaacaccttattcatcaaattcatgaagaaagcgggggcattggtaagtccaaaagacataacagtacattcgaacaacccatacctagtggtaaaagctatcttaggtatatcttcctctttgattctcaactggtgataccctgatcgaagatctatcttggagaaaacagtggcacctttaagctgatcaaacaaatcatcaatcctgagcagcggatacttattcttgatagtcacatcatttagtgcacgatagtccacacacatcctctgggtatgatctttcttttccacgaaaataactggagctccccatggtgatgaactcggtctgatgtatcctctctgaagcaaatcatctacttgccttttgacttctgccaactcattggccgccattctataaggtctcttatggatcggagttgttcctggtaccaaatctattctgaactctatatcccttttaggcggcataccaggtaaatcatctgggaacacctcggaatactcccggactaccggaatctcttccaaagttatttggttcagtcttgaccttaaagactcaggagacaatgcatgaacagttacaactcgaccatcattgctggtgagagttacttttctgttagcacagtctatcacacctttatgtctggctaaccagtccatccctaggatgacatcaaggtctttggattctaacaggataagattggccagaaatggtactccttgaatttctattctgacagaggggctacattgcaaagagagtgcttgattacttggggtactaaccatcaaaggacgtctaagatcttttacttccatcccatgatttcccgcaaaactcatagataagaatgaatgtgtagcaccagaatcgaaaagcactgttgcaggaactaagttaacaaggaacgtacccaaaatcacatctggagcatcttgagcttctgcagcagcaacatgattgacacgggcctttgatgctggtacggtagagtttctctgggtagggacaaccttcacgcgtcggagcttcggacacttgtcagcataatgtcctgggtctccacagttgaaacacaccacgggcttgctgccttgctccctcttggcaggctgttgctgtgtcgaagctgcaacaggacgtggagcttgattgcggatgttgttgccagcattgttgttgaagaactgacgctgcggacgaacaacagacgaagaacctccctgtggcatggactggggtcctaaagtaagacgcggcctttgattattcccctgttgtgtcttgaattgagcgatccgacgtttcttctgcttcatgcgattgtatttgtcttcctgacgaatagccttatccactaacttctggaaatcaggataatccccagtcatgagtgggtaagaaagctcatcattaagtccttccaagaacttctcctgacgctcttcatcattgcgcacatcttccggagcataacgagccagacgattgaactcgtgcagatacttcgtaacagagcgagacccttgagtgagcgacctgaattccttcttcttgagagacaccactcccgatggtatatgcgtcttccggaaagcagcggtgaactcaagccaagtgataggttcagcagtagtcctgttcagacggaagtgatcccaccattcagaggcagggccatgcaactgatgggatgcaaatgagaccttctcctgatcagtgcattgaagcaaatccaacttcttctctatggcatgcagccaatcaccagcttcaacaggattagtggtgctagagaaagtaggcggccttacacgaagaaattctgctaacttattctgaggaggtgcatggttatttccttggttctgctggttctgaagttgctgcatcatcatgttcattaactgagtctgttgagccagaacttgggcaagtgtgggattctctccattgttgttgttattgttgttgttggggccattcccgttgctgcgagtattcaccatctggtatgggcagggcacaagaagagaaaccgggggaactacttaggacagagatttactttaacttttattgatcttaactgagtttcattattacaaaacagaagactctcacaccactaaactcaccaacttcctaacactcgaaagcaaacaaacacatgcacttacatctcaccactgatgtaaatcacatgcgagacacacacaagcaaacttaaaacaagcaaactaacacaacgttctaagacaacggttagacatggcattctagttcttccgagcatcggagttgattgaaggctcgttcggctcgtcttcatcatcttgagttgctccccactcaatcttggaatgagtgcgcttcgattcttctccttcatcatcacttacattgacgaccggaggatccgctagggctggggtaacttctttctccaccacacggacctttggcgccaattggtagcgagggacaaatagagctctcttccttgcggtgagacgaatcctggccttctgcggcggtgcttctccctttaatgcggctaattccttctccaaacgatccaccttgtcttctagcttgcaaatcttaccacaattccgatcttcacgatcttgagccgctaacacagtctctgcacgggtttcatccatagcccacagcatctcaaccaaatgccttgtggtagcatcattctcaattccctcagtctcaaggtagctgccacggtcacttccctggggttggcgaggatgatagcgatactcagtgtcggccaactgatcactgtagcgatcgcgaagctctcctatggcgatccttgccacctcctgacatgcatggttgtagtttcttcctccagcttcgaacatcactgaggggatatcttcactattactgttcaaggtgactttgactcggcacttctcttcatgacgatcatgaggaatctgggcataaaaaggggcagtctcaaatcctatgacaaaggacatcgtacgcaactcctggacaaaaccctccacaccaaacaagtactcaggcttgtagcgtggcatctaaagacaagcgaaaggagggagttaagacatttatccaattaatagcacaagtttttggattaatttgaataaagttagaaaatcaaagtaaaaaaggtaagtaaataaaataaaccaagcttgcaagataagttgaaacagttggaaataaggtcacaaattttgtacttttgaacaacaggtttcaaaagaaataaaagaaagttataaaatcaacatgctaaatttatttcattgcagcaagattaaataaaacaatattgtaaaacttttgctggtatatgagccattagtacagtaatagatgtacagtactaataacactggaataaattttgaatgaaaactactaaaaaaaatattatgaaatgcatgtgccattagtttggtttaattaaaagagaaggggaggagaacagttctacttttctaatatttttagagggcttctatgggtaaccatttggcataacctagggtcaagggggctctgataccaacttgtcacgcccggaatttctatccaaaattccaaacgcttacatgtgtgtgaaccctcgtccaggaatcagccgaggcacacaataacaaattgataatagagtacaattattactctaattaataggcgaataaaatgtcattacagaggtagatagttcctctcaatcaataaagatctaagcagcggaaaataaaataaacggcgcagacggctccactccacaagcagcttgaccaaggctacacctaatcctccacaccatcagcatcattgtagaactcttcctctgatgaatgattgcaaggtgagtatatgacatactcagcaagccacgcagcaaatatgcaagtgcacaggataacaaaggatggcatagtagggtttcatctttttgcaaaagcagcattcagcaaacatttgagaatttaataaaacagttaagtattaaacaatattaacccaacgctatacaacataccctgttgcataggcccaaccattctgaacaaccatcccgactgcacagttctatctccaaaccaggaatataccattccaaaccaggagctaatcaaattattaccaattatagcatcatttactatggtgagaagtgtgagactaatcacgaaagacattgttagacccgcctataaccgcgggcacggctattcgaatagttttactctgatcagaggtgtaccactgtacccacaagacacaaccccacatcatgtcaccatgtgcctcaataccaccacggtacctcggaaaggagttgtgacaataccccttgcataacacaatccactacagcgcacctttcctggatcataatcacccccttataaacaaggcatggactccccagcgacccccgtgggcttatctccgccacttctcagtctggtgctccgcaatgaaccatgctatacaaaagataaagccgttgcccacgctggcttgtggttggcacggttaatgtttcacaaccgaaactcgtgaaccggtccttaattgtcatgagcacgaccatcaaaaccatgtgctcacaacccaccattatcaggttttagttggcaagtaattaattaaccagtcacgattgaccatcgtgaacaatcattaagccatcattaaaataatagtgagtcataagttatcccaatagtgtgctaatgtttctaagcatggataagcaatcacatctaatatctagctgaaccaatatataaagctcaactagtcaagttataataacccaaggtatcaaggaataaagtaaccaagaacaaaagggctatcacaaagaataggttaattccacccaatgacattcgaaaataaatgcaatagttgaatagaaacaatagctttaaacgggatcaacatgctcaaagggttgtttgggatctgtgtgacttgccttgctggccttggaactcttcaaactcttctcctgcgaaaacggactctccggaaacgacggaatctaaacagaaaagagcaaaatcaccaaaacagcacataaacaagcatgaacagtacatgtggatatttttaacatgtagatctcaattttagaaaaatttagagacttgaaccaactaaatcggagctaagatgaattagttatgaatttttgaagattaaatcggattaaaacacttatattgattttaattgaattatgacgcaataatgaattatttttgaaaaggaaaaagagatttattgcgtcagtgggctagggtttcggtggaccgggcgcacggcggcggttcacacgaacggacggccgagatcgacttgatccaaaacggacggccgagatcgaacggtccacgaccggctcacggggaagggcgacgatgacgtcggcgatgacgtcaccaccggcgacggcggctcggcggctcgggcgcgcatgctcgccggcgaacggctgcactacggcacgaacggagggcaccaacgggtagagggcgacgcggcgaactcaccggcgaccaaaaaggcggcggaagagcaacggacagcgacggcgacgaggttgaaacggcggcggagatcgggtcgacggtgacggcggtgctccggcgatcttcggcggcggcgaagcggcggacgaggacggcggcgacttgacgatcacgacggcgaccttcccgagcgacggcgacggctgaaacgacggcggcgcacggctggagcggcggcgaagacggcggctcgaagctacacggcgctagggcactacggacgacgagaggcgaaggcgaaggtggcgacgggtagaggagagctcggggaaccttttaaaggggctaggaggcgacggcgaaggcccacggcggccggcgacgggaaggaaagatcggggtttgaaggaaagagaccgatccgaatcgaacttgattccacgaacttccaaaacgaattagccgacgtttccaaaggggaaaaggtagaggagatcccaaagattgtttcccctcaatcaatttcaccggaaacggaaaggagcggccggattttggaaggaaacggcggcggcgcgaaactagggtttcgggcggcggcagccggaggttgacgacgaccctgacaggtgggccccacctgtcagcgggcggacgcgcgcgcgcggcggcggactgggccagactgggccgaggagagagagaagggttttgggccgactttcggcccaaagccaaaagaagactttttaaaacctttttcaatttaaattatttatgaaatgcaattccatttattaaaaatacttccttagctcaaataaatcccagaaaaatctaggaattatataattaagcaaagtatttaatgaaattttatctggccccattttatattggaatttattaattaaaattagatcttctcttctaggcttttaaaataaattctaaaaattccaattaaacaacaatttatatattttgaatttttagggtgtgacacaaggagacagaattagttgctgccaagctggacctcctcatgaagcgcttggatgaccacgacaaatggccacaaggcaccgtcaaggccttggactcacacattacgcgtgaggtctgcggcaacacgggtcattctgggaatgactacctagaaacccgtgaggaggcgatgtacatgggcaacaacaacaacgggtgccgtccacaagtaggtcaggggtggaaccagccactcccgtattatcaaggaggtaacaacaacggtaacttctctaaccaacccttcttgaaggatctcgtctttgcgcaagctaaaaccactgatgcgttaagcaaaaagctagctgccaatgacaagatcctagagaacataaatgttaagttaagatgacttcgcttctgctttccaaaatcagctgagctttaataaaatgatagaaacccagctagctcagttggcatccttagtccctgcaaataaaactgggaggattccggggcaacccaactcctccgttgaaaatgttaaggcgatcacgacgaggggaggtaagtccactcgtgatccgccatatcctaaccctgcaggaactaacgggattgcaaaagaagcgccatctagtgacttggctgaccgtgccgcaggagtactgtgacacacgattgctgtcgtttcctcaacggagtaggaaaccgtcagtggacaagcaattcactcgttttgttgaagtaatccagaagatccacatcaacgtgccactgttggatgctatgcaagtaccaacatatgcccgttatctcaaggatatcctcaacaacaagagatcactcccaacaacggaggtggttacgctgacggagcaatgcagcaatgtcatactccacaagcttccggagaagaagaaggatccggggtgtcctacgatcacttgcttgatcggggcacagcagttcgaccaagccttgtgcgatcttggagccagtgtcagcgtcatgccaaaagacgtctttaacaagctcaacttcacggtgttggcaccaacaccgatgcgcctacaactggctgacttgtcagtccgttacccggcagggataggaaggatgtgccagtcaagatataggatttcttcatctcggttgacttcgtggtgttggacatggacacaggaaaagagacgccactcatcctagggcgtccgttccttagcaccgcgggagccaacatagatgtgggaacaggaagtatctgtttccatatcaacgggaaggaggaaaagtttgagtttcaaccaaggaccgaacaatgctccatgggccaaacccgcgaaatattcaaggggtcgaagtggagccaccaaagacgaatagcctggtaaagttcatgcagaatttcctggagaaggaaacaacaatgcacaggaaccgttattggaagacgccggtaaaaccaagtacactggccaagaaactagagcagtcggctccgaagaagccgccttccgtaccgaagccaaagaaggtgtggagggagaagccaaagacgcccactccatcacctccggagataggtgaaaaatccgcgcactgaactgaaaggaggtacggtcctgcacgtcggactttgaatgacgcgaccttcgccaacaggtaaattggtatgtacccgcatgtttattttcaaaaatttgaatttttgcatcaacacatgtcttaatttcaaaattgcatttaggatttttgaattttaaggaaattcttcaaatgaaattttcagagcaaatcaaaataaaattttcaacgaaaattcactttgccacgaccgcactgaccgttggaatacaacggccgaaagtagggccggttgggcccaccaggggttcggccgaaccagtgcagccagcccaacggtcggctgcctctctttttgaggcaacagctagtgggccccacaggtcagttttcaccgttgtgggtgcactacttaagccggttgccgggagagggaaatccaccccatttcaacgcatttttattccctctccaaagtttgctctcaagttcattcaagccttgatagtttccctcaaattcaaatacttagttgcatacatacaagttactttggtgaaactaaccggtgggtgaaaatcttgtcatttctaacccccgccgagttagtccgttcttgctccattgtgcggaatgagggggtgattgtctcgtctgttcaaggggtccggctcttcatcaagtcatcatgacgagtctagcactcgttcatccgtcgatgtctcgatggaagacgccaaaatcccgggacgactcctgaatgacaccgacctcgaccttgtcagtgatcgggaaagacaagcctacaacatgctgagtgaccgggagtatgctcacactcgagaatactctctggagttgctaaaaaagacaggtatggatgttgaattttgtgccatttggaaacctgttggttggcagagatttgctatggtagatgagtctggttctcgtttgcttactttgcaatttctgtgcactttgaaagaaatagaagatggaatttcctttctcttttttcataaggaatacacacttacatggaaaggattatgtacacatcttggttttcacgattcctgtaaaatcgatctctagaaaggaatttctgggttcgagaaaaataggttttgggaagataattctggtgctccaatttgcatgaaacctaggacgaatgatatctataatcctacacttaggctcatgcacaagtggattgcaataactttgtttcctagaggtgatcttagacccattaggggggatgaattgattatcatgtttgccatgtttagaaagatcaaaattactcctgtgaaatgtatgataaggcaatggttagaaagtataaggttttctgctcctgctgagtgcacttctccaatttctcggatagcaaaagggctaggggtcattagtgaccaaattgcttttatctcagccgctcgtccgtgtattatgtagtgcaagggcatattctgaaacatggagtagatgtcacgcccggaaattcactaataatttccgaactaatttgtgcataaaatccttgtccaggaatcagccgaggtacacaaactgacaatttaatatacaaatccatcataataataacgttatatacttacaaaagaaaagaaaaacagcagcggaaaaaaggtctagcgatggcttcagctccactcccacaggtaactcaactggggtataagccaaacgttttctccttctggatcctttttcttcaactgaggttgattgattattgcaagaatgagcatatgacatactcaacaagccacacagcaaatatgcaagtgcacaaggataccaaaggatggcataatataggctcatttgcaaaagcatcatttagcaaacatttataagtaaaacagtagagtaattaatcatcaattttaatcaacactgaacagcacacacatgctgctcaggcccaaccatcctgaacaaccatacccagctgtacagatctaactccaaaccaggagctaagcaaattattaccaattatagcatcaatagttattgtgagaggtgtgagactaatcacgaaaaacattgctcaactcgcccatgaccgcgggcacggctattcgaatagttttactctggccagaggtgtaccactgtacccacaagacacagcctcaacatcatgtctaccatgcgtcgcgatattggaaagtacccgaatagaggctgtgacaataccctctgcacaacacaactcaccacagtgcaccatacctggatcataatcaccccctctataaatataaccagaagcatggactctccagcgacccccacggacttctcgccgcttctcagtctggtgccccgcaatgaaccatgctatacagaaggtaaagctgttgcccacgctggcttgtggttggcacggttaatgtctcacaacagtagctcgcgaactggtccttaattgtcatgagcacgaccttcaaaaccatgtgctcaccacccaccattgtcaagttttagttatcaattaattatcataacacgattaaccatcgtgagctaccattaaatataatcataagtgatagtgtaacattagttatcccaattatgtgataatgtttctaagcatggctaagcaattatatatatatagtatttagctgaaccaaactaatatataaggttcaacctaatcaatttattacccaaggtatcaaagaatagggtattcaatgcaaattggccataacaaaggaataggttcacaccacccggtgacattcgaaaataaatgcacagttgaaacaaatagagaacttaaatataggatcaacatgctcaaaggattgtgtttaggatctgtgtgacttgtcttgcaataatcagtcttcaattaatcttcttgaacacttccgacgcactcacgaaccttcgcaacgacggaaacggcaagctaacacgcaaaacggaaaaaaaaacaaataaaaaccaaataaacagtacataaaaagtaaacaaacatgtagatcatgattttagatgaatttagagacttgaacggcctcattccggcttcatatgaattagttatgaattttacaagattaaactgattttaagatttatttttagaagggaaaagggctttatgacatcatcgatgatgtcatcaccggcgagaggctctgaaccatgaggtcgccggagctagaggactcggccgggtcttccgaggactcccacgcgaagaggacgacaacgcgaactcaccgatgcaaagaacaacgacggacaacgacgaacgacgacgagctccgaacggcggcgaagtcgggacgacgacggcggtggctttccggcgacgagcagcggcaacggaggggtggacgggcttcttctcggtgctgcgatgccgagggaggtggaggcacaggtcggggacgaccgaggtgacggcacggcgcggatggaaactcggtgacgacggcggcgctagggtggaggcggctagggcgctacgggcgacgagggagctcgggagttagggcaaacgaaagaggacgttaaggggatgctatttataggcttggattgaagagatcggactccaaccaagaggaatcgaagccggaaaatcatcgggttagtttggagagataaactaaaaacgaatttgattcggataaaatacaaggaattaggttccgattcttaggggaaacgaaagaggaagataaaggaaatatttcccctcaactaattttagaaaaacacaaggggaaagatcagatttggaggagaaaaaccgagccaaatcggtctcggttcggctgctagaggtagaagataaacagtgtcgagggaggctaattagacttttcgtcttgggctggctgaaaacaaagcaaagaaagaaagagaagggggagctcggctgggccgacttgggctgcacggccgtgcacacaaaagagggagatgggctggaaagggcccaagactaggaagaggattattattacttttccaattaaattaatcaatgaaatgatctttgaattgttaaaaatacttcctatgctcaaataattccaagaaaaatcttgaacatacttggacacccaaagtatttaacaatattaaaaccagaccatttaatgattaatttaatatgtggataattactgaaatgctctttgtattaggaattgagctccgaaaaatccgagaaaatttcagagagtataattaaccatggagaatttaataaaaaataaatccatccatgctttatatttaggaaattttatttcccacatttaacttctcttgtaaattaatgaacatttaatataaattctaataataatttattaaataatttataaatcctaaaacgaaaatcaggatgtgacagtagatggatctttgatatactttttccccaattgtacaaataaaatcccgttgccaaatgcggggtatcatttgtacaactgccatgaactaaccattcccctgcagactatagaagaatctcgtgcaggtggagcatacagggagacgtgcaacatgacaagaaatgaacgggaaagttcatcatcctcaacacccgtatagatatatgaggcaggttgggaaccaactggggatgcgctcggatggacccaagctccacgtcacagcatcggagtctcaagctgggcaagtgctagtgaggaccggtggcgtgtgcctcatgacataaaatggggggacaaccaaccccccagaccaagtgaagtacctccatctccaagtgaatggcactcgagttcctctcgttgggacttgggtgaaatcactaggagaatggacactcttgatgtgcagacagggagatccaatacaacctcacggaacacatagcacagacgcaagaatggcaatagaatgctgatgctcagttcgccaacttcaacaacatgatgcagcaacagcacgacaaccttcaagcgtacttccgcttccagggcttcaatccttatcaagtgccctgagcgaaagccaagcttggggggagagatctccccccactaaggtacttgtatcacattgcatatttccctttccaattgcatatttgtttttgaattgcatcttataaaactgaaaacaacataaaaatttgcaaaatagaaaatacccaaaaagaaaatacccaaaacaaaataggataggtttgagtcattctaggtaagacaagctagttctctttgttgaaatgatgaatagttgctctgttttatatctcttatatatgggttcataggtaaagtgctctctcaaaggttaaatataagtagccaacaattatctgggaacctgaggtaaatgagctgcacatgctgatctgagtctaagttgttgtaagatatgagatagtaaataagagttgctatgatcctaatcctagtttgacttgaattgcggatgtcttgtttttcaaaatgataaaattgagagttcctcatttgatataaattcctaccagagccaaaaatgtgctatcatgattaaactatatacactttggctgcttgccattccattgaactttgtcaaattcttgtgacttgtgtagatacttttcatgctctatgatcaagatcatacacccacatatttgcacatgttaaactcctacactgggagctacgcaaacattccattccatttccatattaccaccaaaataaattctccatgctttcaagtgctttcttctcctaaaaagaaagtcttctaaaaaaagagagaaggagggaaaggcatggttatgaaaaaaaagaagagagatgctctcacaagcatgagcatgatgttgaaaaaaaaaagtgtagccatgccctctcctaatcaataaaaaaaattaggagaaggaagtaagcacaaaggagaagcattttctttatttttctttatatatcattcccaccatatatcacacacactttgcacgatcttgatcttgagtatgtttagtcatctgctttagtctgagtttttgacttagtaataaatgtgaatgcaagtatgccatgtttgaaccctacgaagctccacatatcaacagcttagagtaggaatcaaaaaaaggcaaaattggtgaggaattcatattggtacacttggagagactgagtgaatcatgtgaggaacttggctttcttttgcaaaatcatttgaaaacttccggaataagagttgaataaatattaggtgattggtgctctaattgctattatgtctttcaaccacccaaggcaaggagaagcagtgtctcgtgggaatcaggggtaagggtaagctaccgtgccaaagattatttaatctgagagagggtacatataccttacacttgtacctttgagatatacatagtagcaactcattgcgagggtatttccgaccattccaaccgtcacaaccgtcattgggaggctataaaaggagttgctcttctcacttcactcacacacctcaagcaaagctctctcatattctcttaagtttagtttagaagtatcaagctggtggaataggaatagagtagaaatcaggagtccagaagccgtcgaaagagttcgggtatggctctagcagctttactttcctcttttgtaagcttcgtaattttattagaatactcttctttatacatttatggtattaaaatactttccgagtatatgaatgccaactttacattatgttcatgttatactgaatatgccgctagctgatctgggagatgctttggtgcgggtataatgtttgcttatgcaattactctatgtcatgacgatgatattagagtagtatctgctagtttagacgtggtgtctagattacgggatatcattatttggggttatatgttgcggatgaaaggtgggtcgctgatggtgacagctcagtacgggtattcctccgtgcgtgtatataatcgtaagttaattccctgaggagggtactcctccgtatttagccccggttgtatggttatgatgggctgtcgtaaggaactcggccgtcaagggaggcttctcgaagtactaggagggcatcggatagagggtattagctagtatatcgattaattagaatgtatgtatactatgtatattagaactataggaatagataatatttctcttttctttccatttagcttgtgtgtcactctaccattggtttatcttaacccctgcttagaatatgattattacaagtaatatataaattattactcaagttctctctacatgatcttcccacgggataaaataaatacgatacccttggaatactctcggttgaaatgctgcaatggtatatccgtgcgcttgcggataaactctgtaaacataatataccaggagtatttatgcgccattgctgggaattatatttctagtaatgttgttaagaaatacctacaacgagtcggccagttacaggcacatcggtgttggtgccaacaccgtgaaattgagcttgtcgaagatgtccttgggcatgacgcttacacttgctccaatatcgcaaagggcttggtcgaactgctgagtcccgattgagcaggtgattgtgggacaccccggatccttcttcttttcctggagcttgtggagtatgatattgctgcactgctccgtcagcttgaccacctcaattgtcgggagcgatcttttgttgttgaggatgtccttgagatagcgcgcgtatgctggcacttgcatggcatccaacaacggcacgttgatgtggatcttctggattacttcaaaaaaacgagcgaactgctcgtctactgacggtttcctacttctttgaggaaacagcagaaaccgggtgtcgcagtactcctgcggcacaaccttttctggctgaacctcttcatcagccgtgttaccagatggtgcttcccaggtgatactgctagtcactgcaaggttaggatatggtggatcacgaatggacttacctcccctcgttgtgatcaccttaacattttcaacggaggattcgggctgccccggaatcctcctaaactcatttgcagggactaaagcaactaattgctacagctgtgtttcaatcatcttgttaaagcttagatggttttgaaatgcagaagcaaagccatcaagtttaacatttatgttctctaggaccttgtcattagcggctagctttttgctaagagcatctgcgtttttagcttgcgcaaagatgagatctttcaaggaggattggtttagagaagttaccattgttgttacctccttgatagtatgggcgtggctggttcctcacccgacctcctgatagacgatacccgttgttgtttttgttgcccatgtatatcgcctcttcacgggtctccgggcagtcattcccagagtgacccgtgctgccgtagacctcacacataacgtgtgagtccaaggccttgacggtgccttgtggcctcttgtcgtggtcgtccagacgtttcatgaggaggtccagcttggcagcaagcatttccgtcaaggccaagcatttccgtctccttgacggtgtgcatgcctcgctgacgggtctagggtccttcctcgctccaacctatattggagaccaacttctctattaaatcaatggctcctcgaaccgtcttaaagaaaaaggcccctccagctgccgcgtccaagtggttgcgagacgtgggagtgagtccattgtaaaagttctgtagaatcagccagtcatccatcccatgatgaggacaggcggccacatattcctgaagtcgttgccacgcctcaggaatggactcatccatcgtctgctggaacttgaaatccttccgcgaagggcattggtcttgcctatcgggaataactttgacaagaatgccgtagagcatttgtcctaggtgttgattgtagcacgattggcgtagaaccactacttcgctttcctaaggagagaaaacggaaacagccgcagcctgacggcgtcaggactgactcacttcatggtgtacgtgctgcagatctccaggaactattgtaaatgagcattagcatcctcgttaggcttgccatagaacgggctagcctacgccatcgtgatgaggctggacttcaaattgaaatccacgtctcccatgttgatctgtggcccattggccacgttgtcagcagagggagcagcgaattcatgaagggtcttgtcagccatagtatagaaggtcggtggcactggtatggctggtttctttgtcgggagagttttctgcggagcgacgactcgtggtttgacgctccgaaagaaagcttctggattttctttaaagttttccggcaagttgaaaccaatcatacactaccctgtttccacaacaatagtgaaaacaatcaaggttagcctgcaaaggacagtgattatacagaggtaaatataaattattagtattggtaatctctattataaatcttccatggcaacagcgccagaaatgcttgttggtatttcttaacgacattactagaaatataattcccagcaatggcgccagaaatactcctgctatattatggttacagagttcatccgcaagcgcacggatataccgttgtagcatttcacccaagagtattccaagggtatcgtatttatttaatcccgtgggaagatcatagtagagagaaccgtactaatagtttatatgttacttgtaataatcatagtctaagcaggagttataataatccatagggtagagtgacacacaagcataggactactcattctcatactaaattatctaagttaagtggaaagaaaatagaaagaatctattcctatacttctagtatacatagtatatacattccagttatatgattaactagctaataccatctttccgatgcccttatggtacttcgagaagccacccctggcagccgagttccatatgatagcccgtcatgaccatacaaccggggctaaatacggagaagtaccctctccaggaaattaacttaggactatatacacgcaaggaggaatacccgtactgagctgtcaccatcagcggctcacctcttatccgcagcatataaccccaaataatgatacccaataatctagacaccacacctaaactaccagatactactctaatatcatcgtcatgacatagagtaattgcaatagcaaacattatacccgtacctatgcatctaccagataaactagcagtataatcagtataacatgaacatatagtaaagttggcattcttatactcggaaagtatttcaataccagaaaagtataaagaagagtattctgaataaagtacaaagcttacaaaagagaagaggagagctactagagccatacccgaactcttccgaagacttccggtgtggacaccccgagtattatactagctaatgcccaacgcgaccaccacatactattggaggtgtgggatccatacacgcataaatagccactcgtcctcaatgtgtccatgatcacggttgacatcttgtaatataataatcagaatgccgagtagtgaacacaagagataatcataagatagcttgctagtccaccccgtcatatgcttgccttaccacacaaaggcggtgaccaaaaacataccccagtgactcaatccaaaagcgctatccctaattatctcaagcgatcaaaacccgttactcatgcttagctagtccccaggaatgcgactagcctcacactttcatcacaagcaattaataaacatagcaagtaccataatagagttaaagtgcagcgaggtacatgacacataatagggtccaaggtcccaacatacaacacataaatatagcagcggaagtctcaaatagagttcataagcaaaagataaaaccggtggtgccacaaccccactagggcaaaccaaccgggcaagagccaagctacaagagatcactcatcacccatgccaccctcggcagagcaatgaccacacaagaagcataactcataaccggtatcctcacctgaaacagcggcgccgggttaagtacaagattgtactcgcaagtcttacccaaaattatatatacataagggagagagaagtatgcaagcttttgtcacagcctgaatttccgtttcaggatttacaaattatttaataaattattaatagaatttatattaaatgttcattaatttacaagtgaagttaaatgtgggaaataaaatttcctaaatataaagcatggctggatttaatttgtattaaattatccatgattaattatactctctgaaattttctcggattttttagagctcaattcctaattttaataatacaaagaatatttcagtaatgattcacacattaaattaatcattaaatgagctttttcaattttattaaatactttgagtgcccaattgttttcaagatttttcttggaattatttgagcattggaagtatttttaacaattgaaagatcatttcagggattaatttaattgcgaaaagtaattaaaatccccttttccttttggggccgaaataggaaaagttctctttcagtcctcggccatccttccttcctctctctggtcggcctttttttttccaaagtcagcttgtgtccctccttcaatcgggctgtgtaatagaagcccagccaaaagtctgtttggcctccctcactacagtgctccttcttcaacctctagacagagccgactgtctacagcccatgcacagttgccgccgcctgctcctaccaaatccgacctcgccgttgctcctctttccaaattagttgcgggaatagaatcccctcaatctcctctacaatttccccaagaaattcctaaaagtttctatggaaatcatttccaatttcgcggatcaacctttcctttttccggcgggaatcctaaatttcccgagtttttcccgtcgatttgggcccggacccgagctcccgtgcctatataaaggacccctagtcttcctctacccatcccctcaagtcccgtcttccgccgtcgccggaaacgccctccctgcgctccccttctctccacctccggccgccggtccagccgccgtgcgccgtcgcctcggccgtcgcaggtcagcgtcgccacctctctcggctccgcaaggtcaagaggaagcccggcagccatctccccaaagctgaagaccacaggaagcccttcgtcgccgttaagaacaagctcgccgcggcgttttgatctccggcgaggccctgctactccttccgtcgtcgccaagcttcgccgccgcctcctttgggttcgcagctgcgaggtgaaggccttccacccctccgttgccgccgctcgtcgccggaaagccatcatcatcgtggacagtacctcgtcgcccttcggagctcgtcgccggccatctccttcgctgtccgtcgtcgcgtaagtgttggtaagaatcgccgtcgccttctctacctcccggtgccctccgtttgctttattgtgccgtggtttgccagcaaccgttgctcccatgctgttcaccggtgagatttttcctagggccttaatccaatctaacttaatccgttgtctatctagcgtcgtcgtctccgtgtgttgccgccgggtcaccgtcgtcgtctctccctctccgatcgctttggttcggtgagacttctatccatattccctcggtttaggttttaatctctcgtttatgtcatcgagtagccgcgttgtcgctgccacgttgccgtgcaacgcttagctgctgccctagcgtcgccgctgcgctagtcgccaagccgtcaccgtgccgctccctgccacagccatgctactgctgctgtgtgttgccgcttgccgctagctgccgtttggccgatgctcgtgcatgccaagtcgctgccgttccgctactgtagctaccgagccgcctagctgcagctgcttgtcgccttgccgcgccgctatcctagaggctagacctagccgcagctgctattgtcccgctgcagccgccgcgccgctgtcgtgcatcattatcgctaccgctatttgccgctttgccacagccgcagccgtgtcggttgtgcttttgctcgcagcgctgctaccctagccttgcatggtcgctaccggctatgcggtctccctaaccctagccgcgtgcctccgccgagccgccgccacctagccgagccaagtcgcccaagtgccaacgtgtcacagctatgtgtcacttaaacctagccgccgctttagcccgctgctctgtagtcaagttgtctagctgtaggtgcaactctaggttcctaccggcctatcgtttgccgtaccggggctttaccgtgaatcgcatctagcccaccggtttaaccgcagccgttgttgaatcattcgctcgttcgttcgaacgaggtgttccccgtgcttcgtttgttcgtccgttttgagtagtccattagttcagagccgccggttctgttcgccggtttcagttgatcatttgggtgatcccgtgtcacgtagaattgactcgttgaatcggtatctcgtgaggctcgcttgccagatcaatccaagccatccgatcttggttgactcggtcaagattaatctcagccatccaaaatcaatataaattcgttctctcatttcaatggcatattagttctttttatcatatgtcatctaccaaatatgatctaatctatttccggagtctgctttattcttctatctaagttataaatcatttgtaaatggtttaattaatttggaataggcttttctttaataggtttaattggattaaatcttataaaattcgtaactaattcatacgaaatcggaatgaggccgttcaagtctcataattcatctaaaatcatgatctacatgtttgtttacttttatgtactgtttattttgtgtttattagtctttttcctcgttttgcgtgttagcttgtccattttcgtcgtttcgaaggttcgggagtgtgtcggaagtgttcaagaagacttattgaagaccctttattgcaaggcaagtcacacagatcccaaacataattcctttgaacatattgatcctatatttaaattctctatttctttcaactgtgcatttattttcgaatgtcaccgggtgggtgaacctattcctttgttatggctaatttgcattgattaccctattctttgatacctttggttttaattggactaattgtacttatataatggttcaactagatgtattagatataactgcttagccatgcttagaaacattagcacatgattgggataactaatgtttcactattacttaataatggatatttaatgatagctcacgatggttaatcgtgattggttaattaatcaatatgccaactaaaacttgacaatggtgggttgtgagcacatggttttgacggttctgcacgtgacaattaatgtccggttcatgagtttcggttgtgaaacattaatcgtgccaaccacaagccagcatgggcaatggctttatcttttgtatagcatggttcattgtggagcaccagactgagaagtggcggagataagcccacgggggtcactggagagtccatgccttgttttataagggggtgattatgatccaggaacggtgcactgctttgggttgtgttttgcagtgccatggtggtacttcggggcatggtaacatgtgcggaatcgtgtcttatgggtacagtggtacacctctggacagagtaaaactattcgaatagtcgtgcccgcggtcatgggcgggtctaacaatgtctttcgtgattagtctcacacttctcaccataataaatgatgatataactggtaataatttgattagctcctgctttggaatggtgcattcctggattagaaatagatctgtacagtcgggtatggttgttcaggtaaggttgggcctgtgcagcatgggtgtgctgttcagtgttgattaatattgatgattaattaatttactgttttacaattctcaaatgtttgctaaatgctgattttgcaaatgagccctatagtatgccattctttggtatccttgtgcacttgcatagttgctgtgtggcttgcggagtattccatgtactcaccttgcaataatcaatcaaaccttagtcgaagaagagggatccagatggagaagacgtttggcttataccccagttgagctgcctgtgggagtggagccggagcttcgctagattttatttttccgctgcagttttcttcatggtgaggactaagtgtatcttatgtaagtatttattgctttagttattttgattaatctgtatattaaattatcagtttgtgtacctcggctgattcctggatgaggattttatgcacaaatcagttcggaaattactagtgaatttctgggcgtgacaactttctagcctatagtaggtctctaggtgcaacatttgcataaagctaattttattgagcaattaatgagtaaaataagtaaggacaactaaatctagcatcattttaatttatggatagcaagtatataattctggaatgtataagcaaatgagcccaaacggagctctcatcatcaaccatggactaccaaagtccataccaacatggcacaacatgccaacaccaccatcaaacataatcccatccataataatctacatttgatgctaacataactgactaacacatcaagcattgtccataaccgaggacgcggctattcaaatagattatactctgatcagaggtgtacaactggacccacacgaaatgaacaaggatcaaatgctacaccccgttgagtgcggtacacaagtgattcaagctaattacataccctttcctagccccaccccaaccacctataccacgttggggttcctaacgactcagtcacgtgcgtgcgtgatgtgatcaaggtgggcgcgccacacaggaggcacccccggccaaacctaggcacccgaggccctccaaaggctacctacctcacgactctccaacgaggtataaatgatcgcaatagaactagtaagaacaagccggtcccaaataaggcatgtggtaagtacgtagggtgcttgattagatgtcaaaatgttcgatccttaatgacctagacggggcaacttgcatcagggaaaccaacctcccatcatcgccctatcacccgtccaagtccaacatatttcatcaaccattatttagtgtaagtgctcaagttttatgcccaataatgcaaattgtctatataccacaattaatagcattgtccatccctatagttctattagcactaagcatggctaagcattactccctccagttctatattaactgacgttatgggttaatcctctttggctggcaaaaaaagacgttttagctctctccgcaactctctcccttgtatttctccagaataccctcatgcatgcatgcaaacagtaaatgctgttgcttcgtctccatccagcggaaaaatcccaaggcaaaaattaactaatgcctggagtactaatactctggccacggaagcggaaagactccatgatagccaccgtgtgctgctagttgctcgcctctggccattgcgtcgcttcgcctcttgccaccgccgctcgtcgcgcaccagcatcttggatgccaagctgcaggacgccgccgtcgcacatgaagacgaggtgaccatcagcgccatggatgctgaggttgcgccggaggacgacatgacgacgggcagcatcgtggaccacctcacgcaggaggacgccatggatgctgaggttgcgctggaggacgacatgatgacggacggcatcgtggaccacctcgcgcaggaggacaacagcgccgacgccatggaggtggagcagctcacgcaagtgtgcgttcactgcagccgagtccacgagaatggtcttgacgagatcaagtcaaatccaatatggggtggttcaaagttcagatcaaagccaatgtgaggtgcttcaaagttcaactcaaaagcacctatgaaagcattgaaatattgtcatgtcaaaagaaaaggcaatctcagccagccaagaacaaacaagcaagcattgtaaagaacattgttgtacggccaagaacaaggagtatagaaatacttaccgttgccatcatctataggcagctccatgttaagatcaatctcagctccaaattccaccggcggctccatgttcaagtccatgttgatgagatatctggttgggttgaagtgcatatggaagtgtttcttactgctagctaacaatggcttaaatagattgagtgttagatcttatcatatcttatcattctctgtatggatatgcacggatgcatgttggttcggatagatagaggataggactctaatcccttgtaattaggatcaccgaaccaacacatctgcacgcatatatatctgtaaactcagcgcatttttgcgtatagtgaatcaacacgaaaccctgcgtccaccgtgacgctttcctgcatacacctgagttttatatggtatcagagcctcaaagtccggcgtgatctgcaagtccggcgtgatggcaggttcctcgtcaagcactgcctccaccaatcctctctttggcgttcaagtttcagagaaactgaccaaaggaaactatgcgctctggtcggcgcaagtcctggccgcgatacgcggcgcccgtcttgatggccacatcaccggcgccaccgccgctccatccatggagatcaagaagacggcgagcgacaagacgacggagaagatcgtcaaccccgcctaccaggagtggtttgcctcggaccaataggtcctaggctttcttctctccacgctgtcaagagacattctcacccaagtggcgacggcatccacggcggcgcaggcatggcagcaggtgtgcgccatgttcactgcacaaaccaaagcccggtcgctcaacgtccggcttactctcaccaatacccagaaaggtaacatgagtatatctgagtattgtggcaagatgaaagcactagcagatgaaatcgctagttcagggaaaccccttgatgaggaagatttagtcgcttatgttctgaatgggctagatgatgattttgaacctgttgtatctgctattgtggcacgcaatgagtcgaccacaatggcggaagtgtactctcagcttcttaactttgagaacaggcaagctcttcggcaagctcatgcttcggcgaacgcggccgcacgcggccgtggtggttttcagcgtggtcgcggcggcggccgtggcacacgtgggcgcagcaatcctgctgctccaggacgtgggcgcggcactggaggaaatcagactcggggtggtaatgaccgccccatctgccaagtgtgcctgaagagggggcacgtcgctgcagagtgttggcataggtacgatgagacctatgtccctgatgaaaggagtgcggctgcaagagctgcatatggcatcgacaccaattggtacctcgacacaggggcaaccgaccacatcaccaacgaactcgacaagttagatgttcgggagaagtacaagggaggagacaagattcacaccgcaagcggtgcaggtatggaaattaagcacattggtgattctgtcattcatacccctactcgtgaattacatctcaaaaatattttacatgttcctcaagcgaaaaagaaccttatctctgctcatcgtttagctatggataattttgctttccttgaggttcattccaattattttttgataaaggatcgagccacgaggaacacgattcttaaggggagatgctgccgtcgcctctactcccttcctacatcacctgccaagcaagtccatgccgccacaactccttccttctcccgatggcatagtcgtttgggacacccagccgtgcccatagtcactagagttcttagcaagaataatttaccttgttctaccgtagcaaataaagactcaatttgtgatgcctgtcaaaagggcaagagtcatcagcttccctatcctaagtcttcaagtgtgtcaagtcaacctctagaacttattttttctgatgtctggggccctgctcctatttctgttggtggaaagaagttttatgtcagttttattgatgattatagtaaatttacttgggtttaccttcttaagcataagtcggaagtattccaaaagtttcaggagtttcaaactcttgttgagagattttttggtcacaaaattcttgctgttcaaacagattgggggggagagtatcaaaaactcaacaccttctttgctaagataggtatctctcatcatgtttcctgtccttatgctcaccaacagaacggttcagctgaacgaaaacatagacatctcattgaggttgcactcacattactagcacatgcatctatgccaattaaattttgggacgaagccgttcttgctgcggcataccttattaaccgcactcctagcaaggttatcaactttgcatgtcctttagaacaattgttcaaggaaaaaccaaactatacagcattgagaatattcgggtgtgctgtttggcccaaccttcggccttacaataaacacaaattagctttccgttccaagagatgtgtttttctaggctatagtaacctacataaagggttcaagtgtctagaaattgccacaggcagagtctatgtctccagggatgtaacctttgatgaaagcatttttcctttctccgaactccactcaaatgccggcgcacgccttagagcggaaatatctctccttccaccatccttggttccgcatctttcttcattagggggagaacagaataaccatgtgcttaattatccgcctaatgttactgatcagtttggtgaagaaaatgcagaaatcggtgaagaaattgtagcaaacggtgaagaaaatgcagcagcagcagatgaaaatgcagcagcagcagcaaatggtggtgcacaggacgacgtgcatggtgtggcatatgatgcgtcgccggagcactcttcgcctgtgacagatgatgcgatggcgtcggcagctgagcagcatggcaatccaatccaggaggagcacctggtgcaggcgtccccacaaacagcgtcgtccacatcgccatctgttgcatcatcggctggcgtgcatgatgatgtgactactgatcagtctgatcaaactgatcaggccatgccagaagcagctgttgcaccgatcagaccaaaaacacgtctccaaagcgggatcaggaaataaaaggtatatactgatggaactgttaaatggctaaattttacttcttctggtgaaccacagagtctggaagaagcagtgaataataaacactggaaggaggccatggatgctgaatacatggcactgatagaaaacaagacatggcatttggttcctcctcagaaaggaagaaatgtcatagattgtaaatgggtgtataaggtcaaaaggaaagcagatggcagtctagacaggtataaagcacggttggttgcaaaaggattcaagcaaaggtatggcattgattatgaggatacttttagtccggttgttaaagctgctactatcagaatagttttgtctcttgctgtctctagaggttggagtcttagacaattggatgttaaaaatgccttcctacatggagtcctagaaaaagaggtctatatgaagcaaccaccagggtatgaaaagaagtctatgcctaactatgtctgtaaattagataaagctctttatggacttaaacaggcgcctcgagcttggtactccaggttaagtactaagttaagtgagttaggctttgtaccttcaaagacagacacatcactgttcttctataagaaaggacaggtttctatatttcttctgatatatgttgatgatattattgtggccagttctgtaccagatgcaacttcaacacttctgcaggaactaagaaaggactttgctcttaaggaccttggtgatctgcactacttcttgggaatcgaggtccataaagtgaaggatggtctcatgcttagtcaagagaagtatgcatcggatcttctacgacgggttggtatgtatgagtgtaaaccggtcagtactcctctgtcaacctcagaaaaactatcagtaaatgagggaacattgcttggacctcaggattctactcagtataggagtgtagttggtgctttacagtatttaactttgacaagaccagacatttctttttcgataaataaggtgtgtcagttcttacatgctccaactacaactcattgggcagctgtaaaaaggatcttaagatatgttaaatatacagttgatacgggtcttaagttctgtaggaatccctctctgcttgttagtggtttttcagatgcagattgggcaggatctccatatgacagaagatcaacaggaggttttgcagtgtttttaggcccaaatcttgtatcatggagtgctagaaaacaagctacagtatcaaggtctagtactgaagctgagtataaagctctggctaatgcaacagcagaaattatgtgggtacagactttgttgcaagaactgggagtagaatcgcctcgagcagccaagctatggtgtgataatcttggagctaagtatctttctgctaatccaatctttcatgctcgtacaaagcatatagaagttgactttcattttgtgagagaaagggtagctagaaagttgcttgaaattgcatatatatctactaaagatcaggttgcagatggttttacaaaagctataccagtgagacaaatggagatgttcaagaacaatcttaacctagaaagagttaagattgaggaggagtgttagatcttatcatatcttatcattctctgtatggatatgcacggatgcatgttggttcggatagatagaggataggactctaatcccttgtaattaggatcaccgaaccaacacatctgcacgcatatatatctgtaaactcagcgcgtttttgcgtttagtgaatcaacacgaaaccctgcgtccaccgtgacgctttcctgcatacacctgagttttatattgagtaattaagagggtagtttaatcttcaaaagaggcagcaggcgccaaaacgctcaaaaccagctgcaagatgcaccaaaaaattttctataccaagcgcgaacgagcgaaaaaaatcagcttacaaaacttcaccgcgcgcgcgcgagcaaaaatgacataaaaaaatcctgcatgcatggctacagtaccatgcaaaatcggatgaaaatgagcgctacaagcactcgaacacagatccatatgctttgggatggtggctttaaccaagtgagacaagttattcctggtttgcagtgtatccgagcgtctttaataagggtataacagggaatatggtgactaattaataagtcattggtatatgcaatcctgtccaaagcgtcacttaatatcgaactggagggagtaatgaataagacatcccaagtaatcctaaccagtggtaatagggtataaggacagcaatatcacaagaactaaatgcataaataggttctacccatacaccataaaccgataatattaatatctaggcaatgcatgcatatatatatatatatatatatatatatatatatatatatatatacacgtacagattgcaaccaaatcatttttagagaaagaatacgttctatatgcttaggtgcttgccttgctgctgagggtagtcactatcctcctctgtatatggctcgctactctccgaaatctctgaatctatcaaaaaaagcaatatgtgaaaaaaagccaaataaacatgtgcacatgcaaaatgatcaataaattatgaaataaatacagtgggtagagcacatgttaacttgaatttaggtgaaagaatcactagattatcacatatagtttaggagatatgaaaatgacaagctttcaggtcatataatggcagttttgcaaataattgagtctactttagagcattccaagaatcttgcaactcaaaccaagtttttacaagtatgattatttttatgggaagaacatcattcacaggtcctaagaaaaattatttcaaagctatatgtgttgtcattatttatttaaggattttacaagttaaaaacataggaattctaaataaactcctaaacatgatttaagaggtagttttgtcaaaatcattttcacaacagcaaagagtactaaaatataagctcaacaaaaatggttgcacaattttagattttaccaataatttcatacgaatttattaagagctagacacaagggatacatatagctatttatatttttactgggaaaaccagtacaaaagttggtcatttttattttacaacattgaagagctctgtttatgaatctataggaatttggttcactgaattcggagttcatatgaattagttatggatttctaaagttcatacctctttcagtccgatagttgttttagaaatcgatttctattttcactccccttttctccaacttccaccggacttggctcacatggtagcaacctggacgtaagattgtgcgaggctaaggccttgggcagttggcaagaggcggagctaggcctcgggctgacggcaagagacattgcgtagggctgcttcaaccgaaatcaaaaaagatgaactcagggtgagttgcagccaccttctagctgcagtaatggagtggacaacctatagaacgttgctacaaatgttcaacatggagggaattcaaaagaggcaccatggatgaaaaggaagctcaccaaaaggaggaaaacaaaatgctgcttctgcagccctgcaggctgaaaccaccactctcttattccttctcgatctctctcaagtctccatgcatgtgcaagatgttgggatggatggaaagcttggatgatggggattgttgtggtctaacatgcagggattgatcttgggctattggatggggtttggggaggagaagtgagatgagagctcagcttagaagaaaagaaagagcaagcagtgaagatgaaaggggagtaagaagaatgggttttctctgcccccccttaagtcctgatgtgggaacacacccatgggtgtgttgtggggctaaagaggcacccaaggtcagtgacaagtgggcccaagtcgaggtgggtgaaaaactgagtatagattcgttcttgaaatttccaggatttattttctttccctatcttggtaaattcaatttgattaggtaaaatttgttcaacaattcaggaatttggtgtggtgataggtgttggtttataggttccacttttcaaagtttcacacataaattcctaatatttgaaatcttgtgaaaagatgaaattggttaggctgaaagttggtttggatttgtaggaggcctaaacagagagtaaaaattccacataatttatatttgttggtgataaataaactagtatttgaataaattattaaacatgtatacttctgttcaagttattaatcaaatagaagtggtttcaattttaccgattagagttaactttgttatcgcatataatcaaattgcagtatagtaaatatgaaatctaaaggacaacaaatgcacttctaaatacctggtatgaacctaaggctcttacatctggactcagatttctattctatccttactccacaagcttaagaatactaaactaaactagaaagaatatgagagagctcttgcttgaagtatgtcaagaaatggaggatgagagctccttttatagcttcccaatgacggttgtgatggttggaatggtcggaaatacccgttcggagccaatctacaccgtccaggcaaagacctagatcgaacggcggtgaggaaggttcggccgaaccaggggccggcccaaccagcccaaattttggttggtggcctcctctcatgctctcctccacagacttgtgaattttggcccaattcgtcgtgtcatttctaagttcttggcccattcatacataaatctgatcctcgacatcgtccgattaattgatcatctaatttgatgttgattctcctccactttatggttattctctgcaaaaggttagtaaacccaatacgtggaatattattattctaacactaatatgcattgcaaccataactagttctctattttggtaatattgacagtcgaaactgatcgctaacgaccgtcaacaagcaacaggagggcatcggatagagggtattagctaagtaataatataattaggatgtatgtataatatgtatgtatactataagtataggaatatgatctttctatattctttccacttagcttagataatcataaataagaggatgactgcttctgcttagtgacactctaccctatgaattatattaacccctgcttagactttggttattacaagtaatatataaattattagtacggttctctctattataatcttcccacgggattaaacaaatatgataccttggaatactctcgggtgaaatgctacaacggtatatccatgcgcttgcggataaactctgtaaccataatataccagtagtatttctgtgccattacttggaattatatttctagtaatgtcgttaagaaatacaacaacgaccttggaagaagtaaatgccatgtcggcggaacggctgaggacattgttggtgtagattcaacacgaacggttccctggcatcatagacggtaccattcttgcttcatgttgatgtagacaagcgaccctccaatacacggacgagcgacgatgtcatactccacggaaagggagagaaccacggacagactgcatcgattcttgacaaagaggggaaaagcaccacggacggacaacatctcatttcggcataatcacaggcctcacgatgacttcggtgtgacgagacgaaggcatacagattgtgcaacggctccgtcttgacgatgtttacgggcaacaagcagtggtgctagctaaggatgtcccgtttgacttgatgatgagtgtctaaaatcttttaacatctgtaaggaatcactcatctcagcactagtcatccaaccctctgattggttgcagccgtttgaaatcatgtgcgatgctagtaactttgcagtgggagctaaggtaatagtttacactgaccatgctatcgcaaatgctagtaaaacattgactggagctcagcttaattatgccacaactaaaaaagagctcctagctgtagtgtttgtcattgataagttcaggtcatatttagtgggagctaaggtaatagtttacactaaccatgctgcactaaaatacccgctcactaaaaaatatgcaaaacctcggctaattaggtggattcttcaactccaagaatttaacatcgaaattaaggataaaaaagggagtggagaattttgttgcagatcatttgtcgcgtatgcaaatcactaacatgcaagagctaccgataaatgactatctacgagatgacatgctgttgaaacttgaaagtcacagactccgacccgtggtatgtaaccatcatcaacttcatggtcgcggggcatgtaacactgggagaaaataagaagaggttgatctacgagagccgctggaacttgtgggatgcaccttacctttacagagtctgttcagatggcgtactacggagatgcgttccggcagacgaaggcatgaaaatcattgaaaagtgtcatgctgccccatatggagatcactatggagcattcaggacacatgcaaagatctggcagagtggattcttttagacaacaatgtatgatgacccaaagaaattcgttcgaagatgcacaaggtgccagaagcatagggggattactactctagatgcgatgccactgacatacaaccttcaagtcgagttatttgatgtatggggcatcgacctcatggaacctttcccaaagtcctatgagtacgagtatggtggccgctgactatgtgtccaagtgggtagaggcaatgccatgcaaggcgcagatgccaagcacgctcggcggatgttccacaagattatcttccctcattttggaactccgcggatggtgataagtgacggagggtctcatttcatcgataagaccttccgaagctttttgcaagagcttgaggctcaacacaacattgccactccatatcatccccagacaagtgggcagatagaaacatgcaacaaacaaattaagaatattctgtagaagactgtcaataaaatggggaaggcatggaagaacaagctacctgatgcgctttgggcatataggactgcttataaggcacccattatcatgtcaccataccaacttgtctacgggaagacttgtcacctactagtagagttggaacacagggcgcactgggctatccggacttggaatatggacctaaagggagctggacagctcaggaagatgtagctctctaagctggaggaatggagggacaagtcctaccataatgccaagatctataaggacaaaaccaaaagatggcatgatagacagagcaagcacaaggtgttcaaagcagaggacaaagtgcagttgttcaactcacgggtgaagcttttcggacatggaaaacttcgaagtaaatggatgggcccatataccgtcgtcgacacttcatcacatggagccatcacacaacgagacaacaaaggtaacactttcaaggtaaatggccatcgtttaaaatttttccttgatccgttagaagttgatcatgacttagacgtagtaaacctagtcgcttttagcttctacccggagtccttagatcccccttgatccgttagttttcaatggcctgagtcgttaggccaccctctagttatcttaggtctagctattaaaataaaaataaagtaaaataaaataaaataaagttggcttcctggtcttccaaccaaatgagtcctttttgcttcactcttgtctttgtttttttatgtccaataaagcatcccaggtacaaagacaagtgtgtgagtgatcttgcacatcaacaccgtaaccaaagcaagatcaccctagaagtgatgagccatgacaaactgcaaagtcacggtgtcctgtagcaaaatttgcctacaagtatagagcaatatcatgaaaaaaaaaaagagagacaaaaggaaaaaaaggcaaagagaaaaaaaaagataaccatgcactctccaaaatttcaaaacagaaaataaatggaggaggaggtatacaaaaggagttattattattaatagtattttcctttttcaacccacaaatttgccatacacatacacatgcacttcttgacaagaaagtatgtcttgcatttccgtgggtccattatttgacttaacaatatatgtgacgcaagtaatgctctactcttttccatactctgaactccacataagccttattagatggtaagaaaagaaaaggcacaatcatgtgcctttgtgaggaatcatacaccttgagtgatcgagagaatcaactgaggagcaaagaaaagttataaattttgtgttacttgaaaaaaactcaagttgttcttcatgaaaagctagggtgattggtacatttctcaattgctcaagatcgcctggtagacactacaaagacccacaagtacaagtatggctttgaataatttgtttacatgattattagtaaggaagtcataactctattgtagagtccatagccttcacttgggacaagcaaatgttaagtgtgggggtgttgttaacggtccataaatcataatatttgaccatcaatacctgcatataatgaaataaaatatggtatccaacttagtggtagggattattactaatcaactccactagtgttggtgaaatatgtgtatgcaggtattttaaggagaaaacacaaccgtcatacaaggaaacatacatccggccaatcagacgcatgtacacggattgaagtgcccccaagtcaggtgaaaccaccatggaatgggtcataactgtcataaccgccatcagagtcccccagctggtctcctagccaaaggagaggccaggaggtggcgcctagggttcggccaaaccaccactggcacctttgatcctagctttccacgtgtacgctgctgatgacatcccaatgacggttgcagagcatttaggacatttcccatagctgtaaccgtcatatagaggctataaaaggaggagctcacttcacttcacaacaaacaactttgagctgaattacaagaggctctattgtatcttttgtgcattagaaaataggtaaagagtgaggggaagctctagaggagtgcctgaaagtttggcgctctctccgacttctacctcgatgagtttacctttctaggaagaattttggagttgtaccgaagctatcagtacactctgctccgggttcgaagaaactttttctataaagtaagcattcgagatctttttttttatttaattacttagtctaagtgagatagattttcatctttgcgggttcattatttagtatttgtactaagtgctctactactaagactctggataaagaaggaagttcatgtgcaagtattagagtagtaattaataacttaaacgtggtgtttaggttagagattaccattgtttattgtgtatcccacggatttgtcagaggtagacagcaggtggtgacagccctaaatcctgtcatagtaatcctccacgttcggatacatcataaagctatagccggaaccacactggcagaccaacaagggtcggtgcctgaagcaacagataggaaattactttcaacttcgcttagataattaaaacacatagaaaatcctctctagcctagatagcctaccagtagttgttatccttggatagtcttagcattaggtagagtacacacgttctctgagttcgatatccttttggggtcatccgaaggtgaagtgttacaacggtattccgtgggcttgcggatttatctgtggtcgtaagaaataccaacaggcggcgcagttcgggccgcaccactgtaccgtctacgccaacgccttccttggccctgacctcggctccttcgtcgagtggctcgcctcgtagttgtgcctcctggaggggaggaagaggacacctagacccgacgcgctgccgactggagcaccctcccatccacacccaccgccgctcaccatcgactggttccccttttgtcgcagcgcctgtcgccgatcggagcgcccatccagccacgcctcgccaccccagccactcatgcgagctttggctccaccaccgttgtcgccaccttcgtgcgagtgcaagctccgactctgtcggccgccgccgctcgctgcagcaaagggagggagaagagagagaaagagagagagtgaatcgggattgaggaagagagagtagagactagagagagattgagagaggtgagaggagagagatagatagggagacttacaggtcgggcccacactatttttaaaaaaaaaatttgctaattggacagccacttaggattaaaactactttggattgagctagaggggttatttgtccggtttgtatagttgacgttgtaaaatatccggtattcgagtttaggggagtaattcgatcgaccgtacatgatagttttgtggtgtaattcgtacccgcgaatgatgaaggttgagctggaaacggactcgatgatgcttaaaacggcactccacgagaattcttttaatttgtcggctttagggggtgtgattttggagattaagaatgtcatctccagctgctttctttctttctcggttcgttactgccccacggaatgtaataaggttgcgcacgaattggcagcgttgggttgtaatttgcagaactcccctagctgggccagtaccccgcctggtctagagtgtttggtgaccagtgatttggctgggcggaataagttcatctaaggtcctttaacttgtcaatgaattcgattttcgtttttcaaccgcaaaaccagatacagatacaacaggttcctcaactatctaaaccggtgcagattaggtccctcgacggttttggctgacatggcgcctacaaggctaatttgacttggtcttgatctgacgtggcaccgacgtggcgcttacgtggccattcgatccggaaaaataataaacctcatgggacccacatgtcagttttacataaattaattaaaaaatagtagggcccacgtgggccccacgtgtcattcttgacccactcttcttcctcctctctccccatctccctctcttcaactctctctcccctctcctctcttgcgatggtggcacgggcgagcaggggcggagcagaggggcggtgggcggagcggtggtgggcagcgggcggagcagaggggtggcaggtggagcagagcgaccggtgcgctagagctcaaaggcgcagacgaagacggccgcggcgcagtcgagttcggcgccgaagccaccgtgtggtcggggtcgaggtcggcgcagaatccgcggcgctggctctcgacgatgccgccgggagggacaagccggacaccaagcgtgatgttttcgcagatcttggctcgacggtgtcattgctgcggctgcggcctggcgccgcagccacgtcgtcgtcgtcctcctcgtccgctggctcggccaagtcgcccacgctgtgcaatgctggcgcgggggtgggaaggggaggaggctgggggagccactcgggcgagctggtggtggaagggaacccgccacggccacctaggcaccgccgctccagatcggggcgcaagcggtggggccactagtggcggagattaggggcagactcccaccggtggatccaggaacgagagatcgccgaggtgaggacgacgtcgcagagggagatgcgggagacaatgttctcgaggagctcctccgagatggattcccggtacggcgggtggagccgaccaccacaccaccggtctcctccaagaagaagcccgccgccgcgccgaccaccccccgccaccccggcccccgcctcggcacccaccaccccggctccggccaccgcgccacccaccaaggcgcccgtgccgccgcccaaggccaaggccaccccgccgccggcctcctctcccctggtcgaggctcccgtcgcctcgcctccttccctttcgccaagtcccacatccccgccgtggcgcatgccgagccgccgccgctggatctcggatagcctgcctcgcttggctgctccgccacccacccgtgccgtccgctgccaggaaagaagagagagagaagagagaggggaaaggaagaagagaggagtgagggaggttattttttgtgtgtagctaacatgtgggccactatttttattatttttctgatatataattgccacgtaagcgccacatcaatgccacataggataaagacctagtcaaatcagccacataaacatcacgtcaatgaaaaccgccttccaaaccaccgagagacctaatctgcaccggttttaatagttgagggatccgatgtagttttccggttgaaggacgaaaatcagattcggtgacattaagggagacctcggatgaacttattcctggccgggccgtcatagtaatgaaatcggttcccataaaaaaaaaagggacaagggatgtgaacaatgggcatatgcgcttatcaaggtgtcatcagtgtgaggaatgtaacaagcctgctgaggctcagccacagaacgataggcaagacatattggctcactgccacaggacgtgtcggtggcacacggctcacacgcacggacacggacacattgcattctcaacctctcaactcgggcaaactcgaggcacgtttacatcatagccatgcgaaaatatgctttgagaacctcgtaatacagccattgctggcaatatgtgaatgaaacatggtcaaaacatgagcaccctgaatttgaacttgtcagtaacctatctatatgattctgcagataaatccccgagggtaagtactccaaattaccagagctttagagtttataagtcgattctaaacttcactaaatcttgttctcatgtcatcaccatactcatcaccatcttggactttatctgagttcgtctgacgatccatatctgggtctgcttttgcggtattcccttcattagtgggagggacaggactactcccagttccactggtgtgattgctagtttctgatgcattagtcccagtatgtttttccatcatcccagacaaagctaactttggagaccactcaagaacatcatcaattatgttcgaaaccttcttctggtacctagtaacaggaaaaaagagaaatgattactcaactgatagaatatgatatagaatggagaacatatcatttgcacacaagcttcagcacactccgtgcacaccaactagcaaatgtcacgaaaaattctactccctccgtttcacaatgcaagtcattctagcatttcctacattcataatgatgttaatgaatctagacatatatatctatctagattcattaacatcaatatgaatatgggaaatgctagaacaacttacattgtaaaacggaggaagtataagaaattggacatttactcctaatagtattacacatatctgcaaagtctcatattcaaattcattactccctccatcccataatataagggattttgagtttttgtttgcaatgtttgaccactcgtcttatttaaaattttttaaaattattatttattttatttgacttactttattatctacattactttaagcacaacttttcgttttttatatttgcaaaaaaaaattgaataagacgagtggtcaaatgttgcaagcaaaaactcaaaatcccttatattgtgggacggagggagtatattttagccgtaacaaaaaagtgaaaaatctaacagttttaagggtaaaaatctgtcaggattttgtcttttttgttacagctaaaatataatgaatttgaagataagattttacacgtagatgtaatactattggaagtatgtgtcaaatttttctagaattttctgtgacattggcctagttggtgtgcacggagtgtgtaattgatggtaatctgtcagtacaacttagaacaagcatccagtatttctaagtaaggtaccacgagacaaacactaatgggttcatttgaacttaaaattttaggaagagactcagctggaaatgggctgtggaagacttcaatttagcacttagatcaagaaatcaaattatccaggggaaaataaagtgcctcgacaccacctgtgggacatgtgttatggtgagcgctcaaattgtgcctatgctagctcgcatttatgaatttagaatttagaaacattgaccagttatccagtacatgctcatgcaagatgttgcccattctaagagatcgacaaaactatatgcccaactaattagttctgcttttgcaaatggtctataagcacctaacaaaattaggaaacaatatttatattttctaacattcaatctaatttaagagatatagcaatcatccaaccaaaaatcattcactcaatttgttgacatgaagtagtcctagcaaaatcagtctaactaaaccataaagatgactccccattgtacataacaatgtgcaaatcacattgatttcgctaactcaaaattgaaatagtattataagcaatctcaaaaatcagaacttcataccttgccctagctgcttcatctggagcatggtgcctgagcagtaatatcaccaatacagcaacagtggcatagaagagtcttgatgtccactttggtcgctctccctcatccttctcgggccaaaaccgaacaagttctctaaatgttgtctcttcggcatttatatttggaaagaaccacacacgtttcccaaggagtacccatagtatgccaaagatagcagctcttactgcaataccattggaaacataaaaaaagaggattggtcaaaactaaaaccaacaaaaaaaagagataaataagtcattcatgacaaaaacaacaatttattatcactcccaaaattatttaacaaattaagcaatactagcggtatgcgtcaaaattacatatacagtggtcacgtgcaacaaagaacagtatgaatagcaagtatacactaccaacactctagctttgtgttcttccgataaaaaaaaaagaatattaacacactgcatcaaacaaacaaaaaatatgatggatttgtttatctgaagctctacttgtgtatagtaagaaaatcaaaccagtcaaaaggactgagacccaattaggttcttcctgtacacatgaccgtgcaataaaatcgaccaccaaccaaataagaaaattacagcaggcacacagatggacaggcctatgcttcatctttgcttattgattggtcattcccgttgcagcctctctagtcctgctttactttttttatttagttagtggtctggtggtcaacatgccatgcaggcaaaaccaccgtacaaaatagtttgaatgaactcacagtcaaagctagggcagggtattggggcatttccctcttcttgagtaggattagaagaatcactagttgcagtaactaaccagttgctatggtcttgcatggccaaattgcacaaagtggaccagaaaaatagccaacaataataagggcaagccatcaatacttgccaaccctcattgttcacttagcaaatggtgatcgctcataaagatgttttgcaacaggtcaagcaagaaattatatatgtatgaattggatggtgggattgtgcacagaagtttcactttagttccaatctcttttctgtgtggaatggaacttgtatgattcatagttccccttagcaccaaggtgccctcaacaaagagattcagagggatcacacattcagactaaacattccgctatcaagatcctactgtttcacatgccaccaaacaaacaagaaatataacaacccatatcccctcttttttttccattcccatcaagaaattctcacgaaaagaaacctcacaacaaagtatttattgtttttaagaaaccatacttttgactggtttttcccccaaaaacaaagggtgaacatcttttggtcgaccggaattcaagatttggtaaagtattttaccaacatgtagtagttaggaactgaaatgaagatggtattgaagcacaatttcagatatattggtgtcatgttttggtcatgagattctcttaacatatactccctccgtttctaaatatttgacgccattgacttttttaaatatgtttgacagttcgtcttattcaaaaaatttaagtaattattaattattttcctatcatttgattcattgttaaatatacttatatgtatacatatagttttacatattacataaaagtttttgaataagacgaacggtcaaacatgtgctaaaaagtcaacgatgtcaaatatttagaaatggagggagtattttctagtaacaacaatctacttcatcacaagcaacagtttttttaaggagttagatgcactagtggtaccacaacttgtgaagtgtgtaatttagtcattcatcttgcaaattactaaagtgagtcactcatttttattcaggggtgcaaacctcatcgtacacatgacatgttgggctgttcgctaccaaggttggacaatatgctagcctaacatgatgtctcatgagccacctggacaggacaagtttaggtgcttagacaaaattaaaaattgcagattagtcctgtatttttcatgcaactgcatgtagctcatgagtgcatgcagcagctgcacgaaaaacaacggacttatttgcatttttatagcttgccatgcccatgtggctcatgagcgcacaatgttaggctagcatatcatccatgttggaagcaaacagcacacgtggcatgtgtttgatgtgatttacacccctgaaacaatatgagtgacttttctgagcaatttgcaaggtttgaatgactaaattgcacacacctcacatgttgcggtatgactagtgcattttactctctttttttcaaagaattattgcatatctcaaaggtttagaggtcatttagtaatcatttttccaaggctttcaaacctaccagtctaacaaaaatataaatcacatttttgtcacactcccaagctgtcaaacatagtcagcgattaatagtttttagctaaaagcatgattttgagatagactgctagacaggcttagcctactcattgttgcagtagttgtttgtactactaaacagtaaatacaaatagaacgttgcatgctcacaagcaattttaggtctactagataatgccacaaaacgtccttaaaagcagcacataaactccaataaaatttactccagaacatgatgatgcaactacaaaaatgatatagcaaaatattgcagttacatgagtactaaattatgtctcatttatcataggtaacgcagtaacagcatatgcgagtacaagcctacaagggcatccatgcattgtacatattattaatagacactagggagagcataagcttattttttgttttgtctgtcttgtactcgtgaaaaaaaaataccttgattagttaatggtgctaatatttctagcataaaagacagtgttagagagaagtgcttacacaaaagaatagagacaatgaacaataaagctccagcacatgagtacaagaccacaatcttgcattggtatgggtaaactggaaataagcaaactgccaaagcaaagagaggccaaacaaatgaaagaatcgtttgccacaaggtcctccttttgagaaacatccaagcaaaaaatccatcattctcagtgaacacttgttcctgcaagaataaatcaagctcacattagaactactgaggataatagtatcctgaaaaaaggctatcatgaaatcaccactcattattttcaagcaaaatgaatttgcgaggcataactggtttattacatggtcaaaaataagcaagatacaaaaaaaaaaagcttcaaagcgatgcaaaatggagcaaatgtgctagttgatacatgtattgtttcacctgatacagtcgttatctaatttcaaactaaatacaggataaatatgataggaattaaaagcaagaacagaaatcaccaagacacaagaaaaccttcacttgaagccaagagaacaaagatgtgattgccataaaaatgtaatactattgtggataagggtaatagaaatattaggaacattatatcatcaaaaatacaacagtacatcaacaagatcaacagaaagttcaacctacaatgttcttcattagcagtggtacttacacgatgtatctccaaatgtgcaggccacgatgacaatttcttctttcctggtctgacagttttccaaactcggtcacaccttatcacaaggttcttgctcagcagagtgttaacaatgtcttccacttctaaatctttatctggccctaaaatttccctaacttctggatgattcctcatgaaggtagtaaaatcttttccacggaaatactcaacacgagtttcttgcataattgcccatcttgattccagctgcttgttatccctaaccttctcagcaaatagttggtaaacatccttgtttggagctggcttctcctacatatgattgagcagattaacagattattataatcttctagttatatgcgagagggtattatacctcccagtagtgatcacaactggggataggacaggaaattcacatttgcattggctcctgactttttgtccgaggtataggtatttagcattagtcatgaggttataatacctctactaaaaggtatataccacctgattaacaacactatgtacacaatatacctcccaaaggaccctaaaacctgacatttctgaaaacatccatttgctctaatcagttcagccggtttaagtcttgtgcctttcaagtggtggggaggtatatatataatacttcccagggatgggagaaaacctctatatgcattgtgcatttgtgctaggaagcgaagggaggtactatcaaataaattaacttgctacaatgaattcaagatgaagacaaaatcagcttttggtctatgcgggagcaaaatgtatcctaaatggtcatccaaccatgttgagatccctgaaatgttgccacctcgagaaataacaagttacagtgaacaagaaactggaggctcatttgataagactaccatttccagagattccaacacgagaatactaagccgagcacccagaatttcggacagtatttgagacaactaaacccacagtacaacctaccgaaacccaccagtccgtgcaggtcctctcgcacccaagcgagaaaaccaaatctcacagcccaaaaataatagcaccagacataacatatggttttccagatctgttgaaagcctgaaatctcccgtgggtcgaatttccaagacccaaacaactgtaatctccaaccgaaaatttcaccaagctaaaacgcgcaattccaaccaaagcggtagaaagagcaatagctgaacccaaggcgcctgtgggaacaccaaaatgcacaggaaggggcagcaggcggaccgaatcttgagcgaccacgaacgacggagaagcgacgagcgggggcggggagaggatgagcagtcgaacttacctgggacccggcgcgggatgagcgggatacgggggccttcttccccttttccttctccgccgacttggccgccgtcgccttggctcccttccccgccatctcccacgccccgctctgctccgctcgaacggcggcgaaaaccctagaccccggggcctgaatcggagatcgaatcaagcggatctcacgggcgattcgaggaattccgtgcgaatcaggggtaggaggggagacgcagcgcacgcgagagacgagcgcgacgcggaccaccaagtgcgtcttgggcgcgtgcgcgggccggcgaggggcggcgcagggggaacgggcgagacaggcaggaccgggggccggcacgctgcaagcggggccacacgcacccaccgacccacgtcgcactgcgcaacttggaccggggcgccgtcagccttgatccgaagggggaaaggagacagtgggccaatttggattgctaccctaccaaacgtcgggacggctgatacgcgatcagccgcgcagggaggcgcgcgcgcaatcagtctccctctttctctagtctctctgtatctaatctactacttctatacgtatgtatatagtactagcaaaagtgcccgtgcgttgtaccgggtgattacggagtgtgtatattgaccaaaattgttgtttggtttagcaaaagtacccgtgtattgcaccgggaagcgcacgtatcagaaaaaatatgcaattaattaaaatacaaattcgctgaaatatttagtatttttaaggaggtatgtgtataattaaataaatttacaagtaaagtgtgagaaataaaatgacattgttaaatttaattttattaaattctccatgattagttacgctctttggaaatttattggaattttcagagcttaattgctaattttaataatacaaacatcatttaataattatttaattggaaaaagaaagaaaatccttccttttaggtttgcttagaaataaacacattcaataactataattgtaaatgcttctgaaaaaatgaagcactaaaaatgaacttctctttttttcggcccgagggacctaatatagacttatttccagcccgagggacctaaaatagacttatttccatcccggtcggcccacagccttatcaaaaccctaaccctaaccctaaccctccccatccctcccccccccccccgcccccccccccccaaactcattctcctccctctcccaccgcaagtcggcgagtggcggcggcggcggcgaccggtgatctcgcggccgaggcaaggcggcggcatacctgccctaccgcgggcagcgactggtggcgggggaggcgggcggctggggggagggggagaggcgggagagggagggagggggcggcgccgcctgatgggagggggaggggaagcggcggccctctagcctccctcccgcggcagatccgctgtcgcgccgccgacgccgtctcttcccctccccccagtcagccgcctctcccgccaccggcgccgcttcccttcccatctccctcccttctcgccggctcggcgcggcaacggcggggttcggcggagacggcgccgtcccaacggcggcgacgacggcgttcgcggtggccgcgctccctcttcccctctcctacccgtctcgccggcttggcgcagcgacggcggggtgcggcggagacggcggtgacggccgtccctccccctctctctctccccgtcggcctcgacggcgacagcgccctcccaacggctgtgatggcgtcggcttcatccatgggcggatccggcggcggcggcggcggtggtggtggtgtcggtggccgccatttttttttttgcaattttttccatggctattgctaaccgaatcggattgtgcatagaaaaagacagacgaaaattagatgtgacgaccggaaaaatacgaatatttatattagttattatatatacaccacgtgtgtatatatacgtgtgtatatatagtatgtacatacgtatatatataaatatatttttaatgtatataaatttatacacatatacaaagtttatatatatatatatatatatatatatataacgtatacgaagtttacataggacatatacaaactttgtatactataaatacaaactttatatacatatgtattaaaaaataaaaaatacacaacgtatacaaaatttatatgcacgtatacaaactttgcatacgcgtatataaactttgtatacgtacaaatacaaacttggtatacatacgaatacaaattttgtattcataaaatttaaaaaaaccgggaaaaaaacagaagagaaaccagaaaaaaaaagataaaccaaccgaaccggaaaaaaaggaaaaacaaccgaacagaaacggaaaaacgaaaaaaaacaaaaaaaaaacggaaaactcgctcttcctcacccgcgcggagcgtcgccgccccctctccacgcgcgacatgtgtccagtcacgcggggaggggggcgcgcgactgatcgccaacttgttttcttgccaaacgttaccctaccaaaattgtggtagggtagcaaaccaaacacctctattaaaacactacttatgctacaaatttggttttgcccataaatttatctcttataggtatattttggcttcaattcaaatggacatttttaacctctattaaaacactacttatgccataaatttggctttgcccatgaatttgtctcttataggcgtattttgggcatcaatccaaacatgcccagtaagcctgacgacgcgcccttacactcacggaaggatttttttttggaaaacaaaaggaaatggacgtgagaccgcacactatctcagacctacttcatctccagcaatagtccttattttgaagacaaattttgctataggacatcacgactttgtggttttagccgtagaacatcgcacgaactcatttttgggggaaacactccataaacatggtaatttaccagtagacaccgcgtcgattaaaataatgtatacgtgctgacgagacgctaagtgaccgatattttacgtgcagtgaccgaaatgcccatgcttcctcatatttctaggtgtatatatgtcgtcgtctttgtcgtcatcactggaagcagaccgagaaagatgtcccacttgttgctgcaggctgcggagggcctgccagtgctatcggagcaccgtcgcccgccgcccacatttggctggccgacgacaacgttctggttctgcagctacggccgttggaaatggggcgtctcgtactgcacctacatcttgccaccgccgatgtcgtcggcggcagcggccattctgttgttgttgtatttgtggttcatggccaacagctatgtctgcctttgttttgatcccaaaattacaagatttgatatgtgacattgttcgattagaacggattgtacagacaaatagacaacgatgcttacttgcatgctcatgtgcacgcacaagtacgcagcacgagttgatgcaatgcgtttttaactaactagttgggtgcccgtgcattgcaacgggaaataatatatactccctccgtttcaaaatgtttgacaccgttcaactttttagtacgtgtttgaccattcgttttattcaaaaaatttaagtaattatttattctttttatatcatttaattcattgttaaatatactttcatgtattttacatatttcacaaattttttagataagacgaacggtcaaacatgtcggtttcaaacattttgaaacggagggagtaccaatttcaaattatatcaagtaaaaagatgttaaataatcattgggtgaaaatttgttgaacattgaaaaaaatctggcaaatcaaagagactacaaatcaaaattgttatgtagattaattccaattcaagaaacctgttaccactacaatcagagtgcaagctttctgacgtacaaaacaatttcatggtgtttatgaaatcataaaaagacaatatagatagaagactgctatgaaaatttaatgatgtcatactaattaaagcacaaacaaaaaatctagaacatcaaacatacccagatatggtatttgtcatggatgagctgcatatctccccatcacatatctcccgtaaaaatatattggcattgtcatgaaccatcaccaattcactccaaacaacaggacatttccctttttttcctattcacatgtaacaatcttctggacatcataaaaaatcatgatctatatacagagaacaaactattatatattacaaaatgaaaattatctccatagattacagatgaatactacatttttaaatcaaaggatagagactgaattgaaatgatcaaatacagtacattaaagacatgtatcaaacatctgttaatttttgccacataatttgcatacaaaccgttctgataaatgtaaaatttccatcaagaaatttctgccacgagttcatctgtaatgaatgtacttatctccatccacatctccagcattacgcgatatgctatctatcatgagagattgttgatcttagagcatgcaaaagtaataaagtgaggtagcacatcagtccactgctctttcaaattcaatcttcggatgatccctaagagttctgagagaacaattccatatcagtgataataacagtgcaaaacatggactaaccaattcagcatcatagatcctgaagaattaattatgtttttctctttttgcaataccacctgatgcataaagaactacacaatatctagacaagttcaattatggagaataccatgacaatccatgtcttacatttcttagtgaagggagcataaatacaatacagtaacagcacaaaaaaaagtgtattgtctcatcaccctgaattgtgcaacacatttttaatgccatcacgcaaattcagttactgaaagttttgctctatgttaaaaatagcaaggtaatatgaataaggtattatatatgtggaatattttctacgcatatgactccagaaattatatttcacatatcggttttagttttcagccttaacatattattcatttgatttaagaccgggcataaataatttactgcagcaaagattatgcagcgcactcatctagcttgagcatacatgttccatttataattacaggtcactattaaccaaatcatgcatactaaccttcagtttccagtgctattagttacctagcaagcataatatatcgtatgaggtgcacaatatttgggttttttttgtaacatagaagaccaaataacagtccatacattattttgctgtctacaattaggatttgcaaagtccagcatgcatactgcattttgctatgaatcaaactaaaccaaaacataactaatacagccaaatataaaacaatgagaaactgacttgacattttttataggggagggggcttggacagtctaatatgaaacaatgagaaactaacttaaccttcttattataggttagggggcttggaggatggaggcatgggcagtgcggacggaggtggagggacggatgcgggagtgcgggtgggggtaggggcacgggcggaggggtaggatttgcaggcggcggtggcgcgtccgtcggctcgcaggattggataattaaatcatcgcagcatatttatttaacatactatggcagtaagctcggaacaaagaaacattgatcataagagtttgatgctttatcactataattggtggaaaccttctggattgcaagcaaatttagagcctcaactgacctgcttaatttgatcaatgcagcagggcctaatcttaaagctcccgaagacattagcataaggcaagtttgcatggctccaactcctggcctcctgagaaaccaaacagggccttagaaattttctccttagccacatcaaatcattcaagcaagttacgtccaaataaaaagaaataacagaaccgggcatagaattatgcatcatatattagtaactaaaagtcatcagaacattgcaatatttaaaatgccagagaaaacacatttttactggattcaaccgatagagttttttcaaggatatgaagccatggtttcattgtctagagctccaaaattgaacaatatctcagcttaaaggaaaaatgaaataattaatggcaatgaaatacacgttgacatattcatagaatgattttcattgataaaaaaaccaaagtcgtaagcttgtaacttcatggcttttttaggaacaattaaagttcttatgcaaaaaaaaaatcaaggtgcatcttgatttgattatgcaatacctttagcaagagggcttcatcaaccaaattgtgcaatgtctcatgacctgcacaggaaaaatataacgaagagagtgtcaatttgtctaaaatttgtaaagacgtaaatcatacctcgtggaattttcaggattagcttgatctgaaactgcatctcttcctacatttccaataatcccaatcaacctatccatttggaatatccattttgaacaatctaatccgaacaataagactcaaatctgcacccaaatggacgccatagcaaaagaaaatcacaaaaaatgtacaaataaaaaccacagtacttgatccattcaaagtcagcctcaccatctaattccttacgtaaagctcttttttttacccaatcacaatataaaatatatattaacacagatgtgacgtgatattcagttagtatagatgtggccatttgttagtctacaattaaggaattcaacaaccacctaaattaccttgctgtactgtaatttcaaactgcattacccattggtatactatgctggttctggtaccatagcagacaaatacattcagactcgagtaaattgtagtcaatgatctgtttttgctagtttgggttttgtactaataaaaacttttaaccactgaaaattacatacttaccacgaaggtggcaaggcaatccaccatggtctttgatggtttcccctggactgtaaaatgcaaatgagagaaacagaacgtgagcgcacacatataatcagaagaaaaaaaaaagcaaacattcaattgggggacactcacagaacagaagattactgggagcaggacgagacagacgggcgacgccatgctgaccagaagcgagcatcccatggcactgagccacgtaccaatcaaatcccccaaatttctcaatcacgcgaaaatgaatcaaacataaatcgacatttcgcccaggatagcctaaattaaacatttaaaccccaaaaaaaaaaagcctaacccaaggggagaactcgagctgtaagttgtcgtagccatggtggtggtcgtagttgtggtcatggtgatcgtggccgaaggcatcgagctcgagatgcaccttctccgcaagctccttcaggagaagccaccgcaggatctcaccgccgtcaccgagatggagagccccatccacatgatcccgctcatcgagatgtttgacttgggtgcagcgaggaggaggagatgggtggcggacagtggcggatccagaaaatcagtttgttggtgtcataacgtatctatcggtgtcatagtatgctaattatacttagaacatagtgttatagtatatagataagcagttttgttatatgttttgccgaaagtcgtcggtgtcgcctgacaccgacgcttatactgtagatccgcccctagtagcggacgacggcgccggggatggggagggtcgactggagggaagggttgggcaccggggatggaggaggagatcgaggcagcatggtggacgcgggcataaggagcagcggcgacgacgacaacctggaaagatgcgtgggggcgacggctgccggcgaggcgttcgcactacaggatgacatagcttagcaggcatttcaaaacgccttaaatgcctgattaaacgcctcaaatgatctttcaaggcattttaaaaagtgccaaatatactgtcgacgggaaaagtgatttgaggcagttttagaaaacgcctccaaagatatttaggaggcgtttccaaaaatgcctacttaggtattcagtggcatttctcataatgccacccaggagatatgaaggcatttttcaatacgccagctagcagattgggggcattttttaaaatgccagcaagaagatccatggcgttcattgcatcattagtaattagtggtcttttccacaatgtgctcgcatacaaattgtgagcataccaatatgagattgcaactcaaatagagaaatcaaatttatgataaaaaactaataacaacgatgatttctcagtcacaggacaaaactataatcaacaagaatgacatgatgctactgtaaagtgcaatttgttttcatcctccagcatatgatgatcacacaatcacaagtgtctatattgcactttgtacaaaatcttgatagtatagcttcgaattcttattggtgctatgttgcacttgcaagccatgtgaagaaaaccatacagcgaaaataatatgcttcccctgcaaaatacgaattcaaataggatgttcagatagcctgtaatacaagtgcaacatacgaattcatttgaaatagacaggctatctgcaaatacaagtgcagatctgcacatctgtattacatttacaagtcaaatgaggtatctgcagaaattataattgtccataaaagttctaagggaaagaaacaaatgagcataatatgccaatatgccaatatgccataaaaggaatcatagatcaagaaataacatagatgactattcaccttaactgcaacttgtgacttcacaactttctaaaacttctacattgcaaaatataaacaactacaattgagttgctacattttacaattacaaatccacttaaatcctagtaaaaaaataatatatccaaatcagtagttctatttcttattatgaaacaacagagttgttgccatggtcttgagaaaagacattcgaacttgggataggagacttactttcataagctagaaccgtgaagttgttagcacttggctattactgaacttgatagcacttaaaaaccagcgctggcttttccaagactacttgtcctagaatgtacatcttcatgtcctatgttctccttgtatgttagatcatgtatttgtctccttggtgcagatatgtctcattggtcagatgagatgtgtctaacagcagttaacacctagaattgggtacaaataatatttagcatctaaatttttgcaaccttggagtaacaaactatgaattaggaaaattgtctagtaccgtggaatatagtggacaaggcgaagtctataaatttattaaccccgatattatattcaatactagatctcgatgctttcatccaccctttatccatgatgttccaattatgttttgtgctctgttaaagaatacaaaagtgtaaagaaaaagaaacgtccagtatactcttatcaaaccattacaatcaggcaaccagcctaaaaagaggctttgccttgatatcatgcatagcaacaacacaaatgaaatcagcaggaaagacttctttgccttgatatcatgcatagcaacaacacatatgaaatcagcaggaaagacttaggttgtttgggttatgaattttgcttacaggaaagactgaagtaaatataagcatgttaatccctatcgagcaagctatatatttttttgagcgggctatatatattcagatttcagagaacccagaacaaatcctactattcagatttcagtgctacagccatttcagagaattgaaaatatccatttcagataatttatactgcagccattgttctgggaaatgtcaaaaattgaaaaccaaatctatactatattgaaaaccaaagttcagaacaagcactactgcagtctcagattttcagaacaatctacagaagtttctgaacttatatgcatatataggcagtatattaggtcatctatatcagagcatatggtctaaatcaagagtagaacattttttttactatatagatcagattgtacagctacagctcttcgaaacaactcatggattaattcaaaaatatactagggatgattttataatttaagtattgtacaacccacaattcagtactgtacttcctagaaaagaacttatcacagcaatttaagaatcaagacatacaaatttcagagaatttatattacagccaaagtctatataaaaatgtcagagcatttcagagaatttatatgtaggcatgtatctacaaactgcgcaaagtatatcaaatgaagttccagtaatatgtatctagcaaatggatttatacattcaaatgcttgcactctgatatttcaaaagttcagttctgcacataggaccaaaattccagtgtgaatcctaggatccaaccaataataactgaaagtcctcgttctttgtgttgtggatcttggtggttgtgaatttggtgtttgagggcctaatgtgtgtttcactcgatcttgagcactagggtttgaccaagagttgtgtggtgtttgttactcttggaggttgaggactcctagaaggctaggtgtcactcccgagccaccgatctacgtgtggttggccgggagaagtttgtgaaggccggatctcgcctccgcaaggaaagagatatcccttagtggaaggaggagtgcttagtgcaacctcttgagaaaagggttagcaaagacccggctcttagtgggctcctcaacggagagtagaatcccctcaaggatttgaactccgggaacaactccgtgaacttcatcgttggtgatatctcttcatcctctctttagctttgcttaattgtgccgctatagatctagtcgctgtttgcactactcttgtttgtgtgctagatttgcttggtgtatctctttagtggatcagacagtctgatccaacatcagactatctgatattttcagatagtctgactgtggatcagactttccgaccctatctcagttttagcttccgcataaagttttaaacttagcctattcaccccccccccctaggcctaattgaccctttcaataacacacactataaatcgccattgaggtcactatgattagatcagattctatttaggtctaatctaaaacatctacacaacaccaaacatctcctaaccaatagatcaagcaaatttctcaaatcctatcacgattgaggtgagaagggtgggtagcgataggaacataccttgtacttgctgcagtaggccgacgatcgtccttgtctgaggcagcgacagatcgcgatgtaggggcctagggcttgaagcggcgatggggaatcgcagcgcttgtgtgtggagccgcgatggagcaacgggtgacggtcgactgtcgacggtgtcacggcgcgacgggcggggcgcagggctctcgccggcggcaagtcacccccacgaggtcaccgggcggctggggcgcaggacgctcgcaacgcgatgcgctgatgcggcgatgggcgccggtcgaccgtcgacggcggcacgacgggacgggcgacgggagggcggggtgcggtgcggtcgccggcggcaagtcaccggccgggcggcggccaggagtcgcgcgctttgccaattttttttcgctcgatctgatctgagaaagctagggatcggatatggtagcgtccgcgtgattggtgattgagtggtgaaaggactaatttctataccttaaattcttttagggttctttttgcatatgtgacatagattaggaggcatttctctcgaaagtgccttctatctgttgccctggcgattttgcaaaatgcccccaaataacataaaatttacggcgttccgtgattacgcttgaaataggagattttctaaggcgctaatgaaaatgccttgaaagcacatagtttttgaggcgtttttctttaaaacgccttctaatgataaaagtattgaaggcattaattaaatttgccatgtataggaatatttttttggcattttatgaaaattgcctttaaaagagatgatttgaggcagttttaaagaaatgccttccaccaaatgcctttaaatgacatacatccggtagtgtcgtcagtacgtcgctgccaccgccacttcaagcttggctggtcgcgtccatgcttgccacaccaggaggtggtcgctgggcgatgggggtgggcggtgtagtgcacacggaggaaggggcggcgatgacgcagggtgcacacaggaaggagcatcggcggagggcgtaagctggggcgtaggcggagagattcgttttgatggcttgtttggactttggagggtgttgtggcgctggatgggggagggagcgggttgggtcggggacagtggtagaggcagaggtgagcttcgtcgggactcgggagggagagacggcgatggctgcgcttgaggtggaagggatcgaggaggcgctcattgagggggaggaaggaggacgaaggcggcgtcaggacgacagatcggcggtggctgcatgcagttgatacggagaagatcgcagcagcggttgagaggaaggcggatcttacatcgctcgggagaggaaacgtgtgcgagtctgcaggatgagagcgttgcggaagtgatctgattccggattgcggggcgccgtttttcttgggtgattccggatcgtgatccagtcgcacaatggtggtgcggaggagtgcgcccctccgttttttttatcgaggatgtttgagcgttgtatcacacgtgtatattggcttcaccatcatcactacggattttttaagtaatagagattatgttgttattaattgtcgccgccacgacgttgccattgccgctggcggggtgagtctgattcgcgagcgttcgcgacaagcgaacggactccaacagttctcgcttctccgctgcatatatgcatgcacgtgattagcatctagtagtatctcacgaatgttccaagtgccgtttcatctcttcttcctcataactaattacatgcctaattacatgcttaatcgtgattagtaatgactaacgtgccggtagtttgtttcttcggttaaaatactaagtacacgcatgctttatgttttcttgttacaatttgtttggattggacttttttaaaaaaaaaataattcggtgatgatcaacatttttttatttctatataaagtttacatatagaaatttatatatatatataatctacatatagaaactttatgtacataaaatctacatataaaaacttacatacataatctatatgtatatatagaaagttttcatgaaataattcatataaaaatatttctgttaaagaaacaataaaaggaattaaaaaaagaaatctgaaaaagaaaaaggtagtgaaacaaaaaggataaaggaccacgtaaaaagaggaaaaccgaaaattggaatgggaggaataatattgctcccttccgacttctcctccgttgcgatcccttctccgtggcgccattcgcgaatgaagtagttggcgaacgttcatccattaaccttctcgtgtccggggagctactgccgttgttgttagcactcgcccacccattcgcattgccgttgtttttaccgtgctccacgtgcagcgccgcggtaagcacggtggtggtcgctggagctgacgaggcggcgttggccatgctgcagccgatagagcgcgtctgatacgggggaaagcccgaccttctcgacgtaggatccggaaacaccgtaaaacctcacgaactggatgaacaacacgttgcccgtgcaacacacctttcaccatgaattcgcaaaaccacacgctttgataggttgatccacttaaccacgcaaaagtgaatctattgccccctcaattccctgcaaggaaaagtaagaacaatctatggcagaactcccaatccctctctctagtttggcggcggcggcacaaaacctaggagaagaacaagagcaaatttgctgcaattttcattagaataaatgttgtccccctcatgggtcgtgcacaaaggcatatatagccattacatgggttagaaactaactaagaatcaaatacatcacaatatggaaatttctctacagcaccgtcaatttgtttcggctcttgcggtgaaaccagaaggaatttgtgtcgtgggccctatccaccacgtgggccatgaagttagctttccaacgagtgctcacacgtccaaaacggactccggacgagagagaaacaagcgttttagtccattatattcaggctggcccaaaccgagtccgaactgaatctttcctttcttatcttgaaactcctggttttggaaagcttcaatccatggagaaataatagatggactccttcccaacccaagatgggccatatgatagtataactctatccaaccatgccgtgcaaagccgacgctcatcaccattgttgttacttgcgcgtcacccggtctgcccgcacaggatgtcttcaacttgcaattgccgttggtagaaagctcggaatgacatgccgtttgatttgatggaaagtagacttgataacctttcctaatatataagccattcatgttgaaagccttctcatcaatgcagaattcgccatgaacttcacgaacagaatagcatccgatcttccacatgtgcgctgctacacccgtcaccttcggctggaccccatgttgtttatgccagccaatggtccaaatctctcatgtctgaaagtaatcaagtgcaaaatattatgtagcatcaaattctcatatatttcacgcatagacttagagagaaacgagttcaccttatattctgatctgcaagtaaagaacaatgtacttttgataggtatatctgcatcagcgtcaagctgatggtagtaggggcatgtctaggtgtccttgagatgtttcttgtttctctccttcttgatgttttcccacttcggcaacctcaatgacgacacgccgccgccactagatgtcctcgtgtcgtactactctagtggcggcgcttgaatggtgttggcctccttgctctgtggatgtagttggagctgggactgtggcatcattggtattatgtggtgctgaagctgaatcggtggtggtgtttgctgatgatgctgcggtggtggtacagcgaaagacaacggcatggactgtagctgcagaggtggtacagtgatggacaagctgttgaccctcgatatgaaggagatgacgacggcggcggcacaggagatggcaaattggcaatagcacgctactgggtaaggcacaggggcattttggtcactccgcgtaaaatatcgggcccactaaaacttcgtcatcacggatacactattttaatcggcgcggtgtccgctggcaaattactacttttatagagtgttttccccaaaaacgtgagttcgtgcggtgtttcacggctaaaaccacgaagttggcccaggtggggttggccgagggcccagctctgataccaaatgatacaatggcctaactctgctctgataccaaatgatacatctggcccaggcccaggtggggttggctgagggcccagctttgataccaaatgatacatccgccccaggtggggttggccgaggcccaataaattatggggttggctccaataaattaaggttgccccaacagttgccgagacccaatatattaaggttgccccaacagttcttaggcacacccactcggggaaaggccaatctccctaaaagattagtccaataggggaggggtggctctcccttttaaagtggcttcctcctcccaagctaagcaaggtgagattattcagaggttcacacggtcgccgcccgactacaactagacaacttggccccttattgcgtctttgccagcgggtaatagtggatgatgccctcatcaacaatttcaaacaccacaattcaaattcatctatctaccctataattcaccaactgggtcttacatccttcatacttcatctatcctataattcaccaactacctcttacatccttcacacttcattcatcaaatccaacggctcatattcctctaccccgatcgaacgatcgagatcagctctacctctcttccgggtgcgatcgctcatcacggcctctgtttccgcgctcccctgccaaacccccccacacatcacgccctcacccctccccgtcgcgtcttcaacccccgccggcgccgagtgcgccgctcgtcgcgccgcccacatccacggtgagaccctctggatctggcagtctccgatccccatcaccgtaccccgcctccgcctcaccgcaatgtcacccgattccgcgccgccagttcaccgtcgcccggattgaccaccgtcccccgcctctccaccgcgccgatctcctccgcgactcccaccgccgccgccgccgcttctcttggttctcgattttggtttggtttgctccggatttcttgagtcggggaggccgggaggggattcgtctcgtgattttctttgtctattgtttgattgatctacctattcaggaaaatgatcgaggcaatcgacgagtacagcgccgaagatccgctccaaccatggctagagtaagcaataaattcctctcttagtccggttaattcataccagttggttgagccgaaggattttggcattttagggatttatctgtggtttccgcaagctttgctgctcattgctggccttgtctgcttccgacaggaggggattgctcaagtcggctggtggtgatctacgaccagacgacgacctctacaagaaggatctccgctacctcaaagtgtgactggaatatgtgagttcatgaattcagatttggttctgaggtggattggtttggtttccttttgacatccagcttgtgtttatcttttcatgcatgacggcggggaattgtgctgattcctggaggctaacccgatcagtcagagccataccaattactacttgtgtaatgcgttggtaatatattgaaccacagggtaatctctctcaataatttaaattggcacaattaaagatgttggattaattgcatcagtgtgacatccatgatttgtttagcactctgggcagttttactgcaaatttgttggttcttaactctgaagaatatgtctagcttagattggatgtctggccattggggagatagacatagcaggatatggtagtgcatgcgttcgcgaaaaaggatatggtagtgcatgaataatatgtttaactgactatgatcctactgcttgtatgttcacatcaaaatttttctttcttaaagatctgataacgtgggggatgcatgtatgtttgtgatatggttcatcagtatggatgcatcttgtcaccctgaaagtatacggttgccatccatggaataaaggggtgaagaagatggcaagtgtcaatttagagtggtaatttgggaatccatgtcgtatgcttgtcttaggagcttatgacccacgtagacaagcatgtggcaatactacagtagcatcttggcttaatcatcttatcaattggagtattgtgcatgaaagtcagataaaggtttacgactgaatatgattgtgtgtttaagccaaatataataaattaatatgctaatcttaatttattttcatgattgttgatttgtaggtaggtatgcttgcattttctcccgagggaaaactcaaatagtctcaaatttagcttacaaaacaggaattgaagatctatgatttctccatttttctttaaattaaaatctgttttgcagttatgagaaaacaaggccatttgttattcttatgtacgagtacaacgctttggcagcaaatttctttacttacagtttcacatcttacttggagtgcactgtatagaaaaatatgattcagattgcatttcccattaagtatacgcttcaataagcaattgcgagggatgacctttgcatccttctagctatttattttccacttaagttctatggagtatcacatcatgtgtcagtttttgatggcatgccatcgacgaagccagtcgtgccttctgcttgaacacaatggacattgcctccccacttgaacaggtattctgtcatgatgttttttttgactcctaatttgcactgtgttgagatgaatccttctgtacagaccaaatctggaacctctgccttcatggacttcacagctcgacaattccattctccaaaatctgttgtacagagcaacaagtgcaagacatcacccttaatgttcaaatatattatgcaatatagcctgatcacttaatgttcaaatgtgctcaagcaaagttcctgcagttgctattttagagatgtgcaagagatagaatcccaaattctagaattgaggtcatgtccatgctgcaatatcctgaaaacaaaatcagaatattaccttcttgtatttgttctctgtaggaacatgggccatttcgctaacccgaaatgattgggtgttaaaaacaaattgctttcagatattgcatttgccttatagagttgtttcccttttgcaacaatggagacctttcatcccttcgaaactggcagggtacttggatgctttaaagggattcttgcttgccaaaattcacgagatgtgaggatcaagtctcaactaatgatcaagaagatggattttccaactagctataagtatccagcggttctgcaactgtttgctatcatttttgtgccgagatggaatgttccctagagagatagcttaggttagctatccagcggttctgcaactgtttgctatcatttttgtgccgagatggaacgttccctagagagatagcttaggttagcttgttcctttgttctgtaactcagactggcttgttctgcctatttgctgagccaacaactttgcctttgtccgatgctgttgcaagttaagcttgaaaccccaacaatacatgtatcatactcgtgcttttagtaaagctgggcgaaagccttttgtctaaaaaaaggtctgataccctgatcacaagaaaataatgtgaacagataaacaaatggtggcaataaaattcagagatgtctccgatacctctcatatatgtgtgagaaaaaaatgctaattaatttggtgaatacagctagaaatttgcaagtagtacaaaagattaccgtggcgttagcacgggcatgctactagtctaccttataatccacctactgggtcttacattcttcatacttcattcatcaaatctaacggacgaaaatgatcgaaccatacctccctgacctcccaccgcgcgtcgctcccatcccacggaatcgccgcaccgctcccatatcccaatcccacggaaaccgcatccgccatcatcgccgcaccctcgctctccccgcgtcgcgccgacccccaatcccaaaccccccgcagcagctccacctgcgccgccgccggatcgatgggaacgaacccccgcgctcgcaccagcatccagataggcgccgcctcaccgatctcctctgcgccgccgcccacgattcgccgtcgtcgctcacaaatcgtcgtcgaagattcgctgcccgtcgtcgacgacttcatcgctgccacctccgacttctttgccctcgatctccgtcactgagcgtcatccaccggcatcctgatcaccgcgtgtagtcttcgctccggtaagtttacgttaatagactgattcatgtctgtttgctatttttattgttcgcggctatttgttctaatcacccttttttttttgcgggaagggtttataaattgcagcagcgagccagcgaggcgattcatcgatattaaaatgttgtgcatatctcatatctgtcatctcgtagtatgatagcttgtgtgttatagctcgtggacaacgacaatttctatagattcttgtttacagcatgaaccaactgtgaacaattgcaatctttacttgttgatgatcatgggtgaagctcacgtgtcttttctctaggattggtcactgatatgccattacagttacacctgtgagtttaatattttttaccctacgtatatcgctcgcattgcagctggtttattccataataaacaacttcttttcacaaggttatcagtgattagattctttgggcatacgaatctttaaagtttgattttctttttggcatgtttggatgggtattttgatttaatctagatcattttacgttttcattttttacggaatctcataactgtacttttgtaaaatcatgggaaaagaattcccatgtgctctcagggaaggagaaaaataagaggaaatgttaagaaaagaaagggcatctgatcacccttcttatttttaatgcaatttgtagacaattatgcaatcgattccctcttagtaatttctaatggaacaaatttgttgaagcaagggaaaattgcttacccttgcttaaaattcagttcagtctagaaactcatgcagcccaaaaagtttccattatttaattgttgcaatttccaatcatgctttaaaaaccataatgttagtcatactcaaaaccatactgctaggaagtaaaaacagcacctacactgactcaccttaatgactatgacaattagatttaatggtggttacagaatgaatcatgaatactgtgttctcaacatatatttgcagaataaattttgtcaaaaaaactcaaattccttggattaatatcactgtcttggtagttagtaatatttaaccagaatatggttccttggattaattttactttcttgggagaaattatatggcattctcttcattttttgtatggatgaggacaagtgtataaattaggtgccattctcttcattttttttgcatggagtatcacaagtatataaccagcgctgtaacttgttgtcacccttaaaaaaatcacttgttttcaaattgataagggtacaggggtacagaattagctctgtcctacgattgcgttaactattcaggtgttatatgcctgttatagcatatatcaataccatagaggtcattttttaaaaaattcagatgcatgactatatacgatagtgctgattggaaaatatgctgagactatgccatgtaaaaaaagtgaaacaggcaaacaaaactgaaaataatctatgcatcttatcctaggaaaatagtttatgtccacttccctgagtcccacgtttacgtttacaattcatgttttgtgttgtttcagtgtactattgtgaactgtggtttctaggagctgattgggaagctgttgatttttaattgttcaggtttgcatatcatgaaagatcccatattggagattacttgtatatagcatacggtaaaatcaccaatgaacagaggtaaaattacttgtctatagtaattttccactgtacataatatttctttcaaaagatagaatgcagcctggtaaaaaaacctgggacaacgtgcagcagacaatgatctgtggaaccatggttgtggctgatgctttttgctggagaatggagtgagggttgatgcatcatatattaaaggtaactatttttcagtataccgggctgagggtagcattagtttttagggttatatatgtatggattttatcttaatgtcggagctctattgacgatgggttgagacttgatcccatgtcgttggtttcagaatttcagtcatattcagcattttgacagcatatggacatgttcagagtagcatgtactgtctgaatttacagtggtatacatgctgatagtagcatgtacagatgtaatttctggactttggcgtgctatttcactgctcttgctcatcgaaatctttctgctcatgaactgctcgatttgatatcatgttaagtgatcaggtcccatatttgagatgatgttgttcttttccagtgcattccttacttctatgtacttttcaaataatcttcgatttatcagtacaaataatttgtgctatttcggaatgttttcttttccaattttctatcaaaaaaaatcatgtgcctcatgtttatgtttaacagtgtggtttggcatctattgagctacagtgagtgttatttacaaggtagccaatgacaacagaggtggatgcctacatcatggtcttagcctcgtagggcacatgaaggggctgtcctggtgaagtgctggggaggcgacgacctctggggcggtgaggtcagcttgactgcatggtgtgtactttgactggtattacatgatttggtcaacttatcgttttgaaatatgatacactgatttgcatgattttgtgttgtacctaattggcaggattgtcaatagttgtattattccccacttgatgatcaagcatgattccccttaagatatggtgttgtttaatgttggtgtttatgctgactctttgccatgtaaaacattgagcaagctaaaatttaaatgaactaatttatgctgatcaaggcctagcatttttctttgttttgaaacacctttcgtttcacctctctgtagcacaagcaaggcatttcaagttcaacacaatgaagtgcataatgggctattgggctgttaaataaatctgaagcatgcaatggctgtagataccttattactctcctacatattggatcaatcagaattgtggaggttttgtggggatctggataatatttttctgaatcagtggtcatagtatgcgtataatagattattattgagagaattccttgctacttaactagatttgtaacccctcccgaattccttgctacttaactagatttgttacccctcccatgcgattcccagagatgtatagttatcaaaccatcaagtggttattgtggtttatgtgtattacattttgtattaagaacaacggaatgtggaagcatttttctggcgatttggatgtgcaatatttgaactacataaaatattatcatagcgttagcacgggcatattactagtaattaaaattttcaaacatggaaatatggtgtgggcacagtgccatatacaacaacatgcaaccaagatttataattcaccaatgaaaatgaaaattgctcataaaaaatggactatgtgaatccaatgatccattatataaattaaaaataacacatcctacaagtatgaaacaagtatgaatggttcgattataaataacaaatatgaaagtaatataaattattgcagaaataattaacaaaaaggactccaaaggccaaacgtggtaatgacatatcctactagtaaaggacacatggatcataattcctgttaactatgctatagtttatattcaaaatttagatggatcgcaaagaaagaaacagtgatactgtccttaaggttgtaaaaatcattcatatttccatgttcagataatgcaaactgagtaggctatattctattaatcacaatcgataaatgaattgtacttcatttgataattaacagtgataatttccaagtatagtgctcaagaacaaaataaaacacttcacaaaaatctgaaacctgatctggacagtgggggacatcgtcggagagggcgccatggacgaggggcacctggggtgcgatcgccgccagagacaacacgcgggagagaaaaagggggaagagcgggaattttctcccgcgcttctccaccatgggtccacaaatgagccccagcactggggacctaaggagattatttgtgtgccttcctattttgggggttttagtaagggtcctgttggatcttagtttttggtcttaactctcaaaacagtttttggtcttaactcttaaaaattgtttgagggctatgtttagaggctatgttggagatgctctaatacaccaagcgatacatgtattttttttcttcttatagaattttcttttaaattacttattcgatttataatccgattacaccattgtgtttgttgcaattaaatctttacaacaagatcttacattactatattttgagaaaagaaatatctacattgtaaattacttttattatatatgtaagttatttttatcatatatataaattacttttcgatttgattaaattacttcttatatattcataatgttgtgagttgtttattttattattatttttagtcaattccataatttttgctgattaaatttaatttctagatagactcatgtttttacctccataacgaatctacttttaatgtcatgataaagttacttccttttgttttaagttactagtgggtgcccctgcgttgcaatggaagaagaaaatatatttatgaattcaaaacacaccaagaacaatgatgttagataatcatcgggtgtatgtttgttgtatcaaaaacattaatacacaataattatatcacatctttatagtgttcctaattaaataacaagaacaataaaaaatagttgaataaaatatcacggtaagaaataaaatagtgcccctctaatcggaataccacttagctaaacaaaaaagttaactcatggcatacagagacatgagtaacattatgatcatgcaaaagaaggcgaattatgatgaagcaatgcaagcacaagaattgttaataaattccgattcaatcttcattgtacagataactacaaataacaccttggtcgtcacaagcttggacagaagcattgtttcataaactgaatttcagctgctccacaagcttcaatctccacggtacaaatgacagtaccacattattaactattcgaatgctaaatggagaatggtgcaatgattagtcatctacaaggtcctagtgaatttgaaataaagttgatcagtggcattacgtgttaaacatcaaagttccagaaaaacaattgcaccaaatttaaataaagatgggaattatcttgttgcaaaccccatgataggtaatcgacgataattaaaattctacaaataatgcacaagagtgattctccagtgctctctattgataatagaattaatcggagcaattttttttaaatctaagggatcagatctattctactaccaacttagtaaatggtagtagaaccatgtaagggtataattgtctaataaaataataaaataaaaacatcggagaaaaagtcagacaaatatttttgactcagctaaaacttaaacttgggctttcttgttctccatgatgaatcaaggcggcggcacgaggctttcggtcctgatcgaggacagataagcaatcttgcggcctggctacccaattagcagctaccgtgttagttttgatgtgaacatgtattcatgcatcttcatccaaacaaatcgtataggagtataaaaaactgaatagcgctattcaagtgcatgagttgcttgatatatatgacaagtgatcctctcaccgcaaatcaaaggcaagagataaaaaaaaataatttctcattatgcgcgagatctagtcatgcaaatttctcgaagagaaaaagaatagaaggcacaaatcatataaagaaaaacttaacattatagcctaataaatcaatggctaagatcgtttctactaatagtatcatacagcagagagcaccggagaatcactcatcctacagatattgctgttgctcctcttcgttgatgcagattggacgccatgcgtagcatcagcgtcacagaccatctctaggcagtgcggcagccctgacagctgcggcagcagggagataggggacaggtcagggcgaccacggggccctcgaactgttgccgctgctgcttcgagctgcagctctccggccgtcagattccgaggatgaacagaagagagtggggaggagacgaaggaagaagaaaagagtaatttcgtctataacatttagaatatgggttgaagaggtaagtagtggtatttatctaataactctaaagttataatggtataattccaaatagttgaattgtaatggcatattttaaaaccatgaaaattataatggcatgatctaattaacccttttattattgtcattgagaagagggaacattgagttagataactctaaattagatggatggaactcaaacattacagcagggagaagacatacatagtatagtctcctccaagaacaacataattttgtaccccattgcgttaatcagctattagcaacatccttgtctcatgcagatcgaggacatatctggcaatggcggctcagatcgaggacacatgagcctatggcggaagagattgataatgctcctctatggcgacacagaaggaggcctcccagttggtgatggtgcagattgacaactcctctcggtgacggagtacaccctctgtaaaaaagaacatgttgggccacagtagaacctgggcgccataaaggccattgtctacctcacccaggtgatctctcggtatttctgctctaccatgtcgtcacaaataggcagaatatgtaaaagtgagcctattaagttcaagaaaacatattgttttatatcgtttcagacaaacccgattctataaataattaggcaaaattggttatatagcatcgaaagttcacgtttttggttttatagcaccgaaagttaccggttcactttaatagcacccaaagttcaccatgttcccatttttaacacttccgtcaattctcgatcattttccgtccgtcttgatccagccacacacacgatatgacgtttttacccctcacaagtacaagtataatgcatatcaatgaggggtagaaatgttatatcatgtgtgtggctggatcaataacgatcaagacggacggaaaaattgacgaaagtgctaaaaatgggaacaaggtgaactttggatactattaaagtgaaccggtaactttcggtgctataaaaccaaaaacggaaactttcgatgctatataaccaattttttcaaataattaatatttgatctgaattgaactttaaaattggtaattcagcgactatcaagcatcaccctaaaaacattagtgagttcacacatagatctaataatttttctcaacataactgcaagatcacttgagcttacatataacctgatttaacctggttttgccaactggcgcgttagttttcatctttgattgctgcttctaagtaatctagtagtcgttagtatttcttcaaggaaaaaaaaagacactgcaataatgtttgagaaatatttcttctaactttgtattccacaagccgagaatatctgggacactaatgccttttttcagttgtgataacttttatagctatacagtttccttaatcatatgagatgctttaacataaaagtttttatagcccaagagcgatagtcattatcctttatttgttactatgcattttgtgccttaccatcttgctcctatgtgtagaaagttgtagtgcagaattccttgcagtaacttatatgaagcgatgccctggatgaatttagaaccgaggtagctgtctgcaatccagttttatgactgcaaaaaaggaaagaaaaataccttagcttcgatactgaataccatcatgttttgttttctcacatcagtgaattgaggccaattagagggagaagaacagaatttgcatgaataaggaatcatgtaggagaaatttgcaggaattataaacatgtttacaatacacaaattattgagcgaccagaatcatgtatgaatgatccatagttatcaactgatctacaatacactaaagatgcaaaatctctgccttgactgttcactaaagctttatatctccatgacaagggatttgaacatgtatatgcaattaacagaaaaaagatttgttaagaagaaaatagagtgaaactaaattcatttgtgaaacaataaatcagcaactcaactgaatttattagtcgcacaactaatgtacaatatatgccatcagtccacattaactcgatagatgcccttatttggccagtgaatagcagttagagaacagacagaaattttgatcaagcctgaagtccattcaagatagatctaaaaaataatagctaatatagattatgaaatggacttctggaacaaagtaatttatagttcttgataaataagatgatgcagtaatctgaaatctcacataaatgaaaaaacacagaccaaaatcctttgtgctccaaaagacataacagatggcataaaatggaggcatcagattttttacagttctccaaatcgaaggagatgcgtacctttgagctcgatttttgcggagattgtgcacatatgcatttatgctacttcatcaggagccctctaatttcctatttcctgcttaagaagagaacacctaatcacatggttgatccaatccttagccatcaacaatgtattgttccatgaaaacatgagccataaacccttttctatacaggacattatatgaagcaaagaaggtgatgtcaaaccattacataaacaaatctaaccatttccatgctacaaacaatgtactctatatgtcaagcaaactcatgcttaatgtcattgtgagaaccaggtaatccaaaaaaagcatgccaaatccaaagatctttcgaagcaacaacttccagtattatagtaggctcatgaacatggccttggtacatgccagaccaagctgttggacagtttttccacttccacatgcaatctatgttcccaagcatacctggaaagcctttttgttctccaattgcaagcaatctattagtatcatcttgattgggagaccttaaatattcatccccaaatatttcaacaatagctctcacaaaccttctaagacttgacaaaatggtgttctcagccataccaagataatcatccaaaaaatcaacgggcacaccaaaagcaagcattcgtaaagcaacagtaatcttttgcaatggatgtagtccaagtactccagcagcatttctcctttgaacaaaataataatcatgattttgtactgcatgcacaatgcgcatatacaaagattgagccattctaaacctacaagttaacaaatataaaaagtatcattataataggaacaactaacgatgaaaacaaaatatttaaaatggtgtaaaatgattattgcgtaccttcgacgaaacaaaaccggaccatatgtaggattatcacaaaaatagtccctcattaatcttgcaagtctttccgttctatcgcgattaatcactacatgccccgaaatagaacctcttctacctcctacattgcgttgggctcgttggtgatgctctatcatgactgttgttgccataataaacacatcgtcatcatccgacgacgatgactccaaagcaatttgcatggctacactacggcgcctcattatgaagtggtggtggagaagcaagcaaagaaaatgaagtgtagagtggtagagaggtagtatgaggggtgacatatatatagaggtttgaaaaactagccgttggaatatgaagagtccaaaatggagagtctgttggagtggatggagagtgcagattttttggagagggaactagccgttaggatttggagagtctgaaatggagagtctgttggagtgtgcagcaggtttggagaggaatctttttggctagttggctaaatagacaaatggagagtcaaaaatagcgatgctgttggtgttggagatgctctaacgtaggaacgtacatggacacgtttcatggcgacacgctcctcctccgcaccacccacgcgcgattcctacggatcgcgatccacaatcaggaaagaaaaaaacatgctcgcgccgctccccttcgccactgttgaaccctgagttactctcgacactcaaggctgttgttggcccgatctttcggtgagttgtgataactacaatttaggagaaacgttgacgatctgactacaaccgtatgagacgttgtgttgagccttagcgatcgatacacctctccgtgggttgctgatcttgccagtgcagatcaaccctattcctgcaagcaaatcgaagaaacaagtaagaacaagataaaagcaatctgatattgcaaataggaatttaatacaaatgataagttagggttccgaagaacaagtagacggacggtctagccgacatgcgcgctgcaagcaagtagcaatggctaaactttaatctatcaaaaccctataaactctaaagggctacctagctatttaaggaggtgggaggtcctctaggtcgtcctccacctggttggggcgcaccccacatgggccccacttgggccgaggtcccagacgaagttacaagcccataggcccattacaggtgttgcagcaccttgtttcttcagtttctgccgactgagatggaatttgacaatgaggctggatccattggaaagaggactccgagagctttccatcaagtactcatgggccgaaaacggaggtcgtatgcagattcggcggccgtttgaagtcagcagtgtagcagatggccgaattggattctggcatttggaggactcgaacttgatatcttattgttcttctatgatgtgatcaacggatgtatccgtagtaaccatggtcacattagccacggctcatcatctcgtcgtgaatcccctccgcctccgcaatccgcggcggcaccacacctccctcccgtcccgcacctcctcctagatcaccgccaccgatcccgcgtcctccaccgtagccgaatccccttcgccgcgcccatcgttggatcgagcgctgtcgtcatatccacctccaccgctgtccagtctgccgccccacatccccgtccccggcgtttctccacctcgcactccacgctgcatcgcctgccgtcgacgctcgtcgccgtcgtgccccgccatcgcctgccgacggcctccagcacctacctccgcctgtctcctcgcctcccgccccctcgctctcccccaaacgccaccgcctccatccacgccacgcagtcgatccccgctctgctctcctgcgtgcccccctatgcgtgcgcactcttcctgccgtgtgatctccgtcacgccgccacagagaatcaccgtcgcctcccaccacgtcaaggcaggggtcgagcaggccggcaggccatggacggctgtgcccaacgctcttgacatgtactacattgcttcgtgccattgctcccgtagtgctcgatcaaatgcctttagtttttttcccccaaaaagttaggcaaaaattcagttcagcctagacattcatgcagccccaaaagttcaccattatttaattatttcaattttcaatcatgctataaaaaccataatgttagtcatactctaccatactgctagcaagtaaaaacagcacctacactgactcaccttaatgacaatgacaattagatttaatggtggttgcagaattatcaccccacttacatggtcaggttgtgacgaaatatcatacatacatctggtcagtataacactatatcctaccatttatcccttgttctgcatttttgttgtagatggacctttctgtgcaattaattaaaggcactcaacttttgtactatgatctctgaacaaagaaattttgtgaagggggaagtctttctgaaattgaccatctggaaaaaaaggttctgacattgctttctatgatcaacagtcaattgttactaaattgcagggcctaacctttgtatgtgctatgagtcaatccaatgaaggcataaatttttaattatcgttgtccaattctggtgttgccttgaattgtgggagaggtactactaacgtgcatatgaccaggtgtcctatacattgtagatgagatcattttgtgaaaaattaaaaccatctcattatggtagtgtctgagttgtgaagttgctgatgaaacatccaaactgaatgaagttttttttgctgtaagtgtgattactgtatttaggaggtcagtggtaatttattttttaaactctctcgctgatttggtttcatttcatttaggtagataatgtgctaaatttattacaaatcaaaattctaccttgcccatcaccatcgttctccatcatgatcgaccttctctccagtctctccaaggtgagttacgcaaaccttctcttgtgtcaattttattcagttatgtattattttttgctgattaaaaaggatgtggctgcatgttttgattatttttttgctgttgcagtagacaaaccacagctttgctgttgcagaaggcaaaccacagctcgtgtccctagcgcaagcggggaatgagatctctcatgagagtttgaagcgtgaaggctgtttttcttgcgggtttcttgtgtgagattggggtttcatgtctgtatgtgtgtatttgtgtggacatctaactttctggtgttgtgcagacctaagtatcttggatccgcttgtgatcgaaggtcttgactactctcttttgatccatagtattgtgtcaaataaatttgatatgtagctttggtgtccttaaatggcttggttattttataactgtagtggtggcagcttcgaaatttgcattgctcatgtagacaggggacaaattattttttttggcatgtgctcttttgcttggagtattgtgtgcctatatagctgattgagctatgtttagaagcactgaacaagaatcattacagaataggggcactgaataaaatgtctcttctccgcatgaccctgattcttatttccttatttttgggatcggttttatcattcatatattcaagcatataggtgcaatggtgaagttgatttgattctctgttattgcttagtgtcttctatatattatggtattaagaaatccatttcagtacatgcaccatgtttttgtcttaattttctgctgtgcagtttacccatctacctttctggtagctctttcacgtcatgatccccacatcataatctatatatttcagttatagttagagaggaaaagtcgaatttgttatgagcttatgaggatttaattgataccaaaaattgatttttgtagagttgcatttaaaatatgaagaagttacttgcaatggataacaatggtagggattccgcctcaagatcgttgaaaagatcatgtccgactttcatccacccagacatagtcatagtcattgcttgattgagatattttttcctcctaattttacaaatacctcccttaggtccttttgccgatataactaatctaattgataccaagttgacaaacaagcgtgccgctgttaaccaaaatgaaatcaatgttccaaaagaccgtgacaactgtgaacagatcagtaagaacgataagattcagacagcctcaacaattggatttggtagcctactcataatgtttatattttttaatatgatatatttgtaaggctaacaccaacattacgattctatggtacatgcaatgaaaatgtgtgttctgtcatgacgcccgtgcatctaccatctacagagtctacttttcctccctgccgctacagtggcatcttcaacctccagccggctggagacagagcccgatgccgccattgccgtcgatttcccctccaaatccggtctcctctctcgtgttatttcaaaattagttgaggggaaatattcctcttatcctcctctatcctttcccccaagaatcggactttatcccgaagaatcaacgcggaatctagctcgattcgtgtttatctctccaaaccaaaccctagaaaatcccggctccgattctctcgttgttggatcgatctctctcccatggctataaatagagtcccctccctctcctctttcggctggcacctctacctctctccaccgtcgcttgtagcgtcgtcgccgcgttcgtcttctctgtccaccgccggcagccgctccagccgcccctagcagtcgcctcgtccccaacctgtgccgccacctccctcggcatcgcagcaccgaggagaagcccgtccacccctccgttgccgctgctcgtcgccggaaagtcgccgtcgtcgtcgtcccgacttcgccgccgttcggagctcgtcgctggtcgtcttccatcgtcgttcgtcgtcgtgccgccccttggtgagtttgtctcgtcatccccttcgcgtagatgccctcggttggtccggccgagtcctctagcgccggtggccgtgtggtccagtgccttgttccggtgatgatgtcataaagcccttttcttttctgaaataaatcgttaatccttttctgtataaggctaaaatcagtttaatcttgtaaaattcgtaactaattcagatgaactcggaatgaggccgttcaagtctctaaattcatctaaaatcatgatctatttggtttttattagtctttttcctcgttttgcgtgttagcttgtcgttttcgtcgttgcgaaggttcgtgagtgcgtcggaagtgttcaagaagactaattgaagaccgattattgcaaagcaagtcacatagatcccaaacacaatcctttgaccatgttgatcctatatttaaattctctatttatttcaactgtgtatttatttttcgaatgtcaccgggtggtgtgaacctattcctttgttatggccagtttgcattgattatcctattccttgataccttggataacaaattgattagtttgaaccttatatattagtttggttcagctaaaagctatatatatatatatatatatatatatatatatatatatatatatatatatatatatatatatatatatatatataattgcttagctatgcttagaaacattagctcattaatgggatggatcattctacattattatttatggttatatttaatggtagctcacgaaggttaatcgtgttatgataattaattgataattaaaacttgtcaatggtgggttgtgagcacatggttttgaagatcgtactcataacaattaaggaccggttcgcgagcacgaccttcaggaaaagaggagattgggccaagaaagatagaacttttcctgtttcggcccgaaaaggaaaagaggaattttaattacttttccaattaaattaatcactgaaatgatctttgaattgttaaaaatacttccaatgctcaaataatttcaagaaaaatcctgaaaatacttggacactcgaagtacttaacaagattataattagaccatttaatgattaatttaatatgtggataattactgaaatgttgtttgtaagattaaaattaggaattgagctccgaaaaatccaagaaaattccagagagtataattaaccatggagaatttaataaaaattaaatccagccatgctttatatttaggaaattttatttcccacatttaacttcttgtaaattagtgaacatttaatataaattctaataataatttattaaataatttataaatcctaaaacaaaaatcaggatgtgacagtggtataaatgatcacagtagaactagtaagaacaagccggtcccaaataagatatgtggtaagtacgtagggtgcttgattagaagtcaaaatgttcggtccttaatgacctagacggggctacttgcatcaggggaaaccaacctcccatcatcgccctatcacccgtccaagtccaacatatttcatcaaccattattttgtgtaagtgctcaagttttatgcccaataatgcaagttgtctatataccacaattaacaacattgtccatccctatagttctattagcactaagcatggctaagcattaatgaataagacatcccaagtaatcccgactagtggtaatagggtataaggatagcaatatcacaagaactaaatgcataaataggttctacccatacaccataaaccgacaatattaatatctaggcaatgcatgcatatatatatatatatatacgtatagattgcaaacaaatcatttttagagaaagcataggttctatatgcttaggtgcttgccttgctgctgagggtagtcactatcctcctctggatatggctcgttactctccgtattctctgaatctaccgaaaagaagcaatatgcgaataagagccaaataaacatgcacatgcaaaatgatcaataaattatgaaataaatacagtgggtagatcatattttaacttgaatttagatgaaagaatcacaagattatcacttatggtttgggagatatgaaaatgacaagctctaaggtgctgaaaatggcagttctgtaaatattaatgtttcctttagtacattacaagaaacatgcatttcaaaccaagatttcataataatgattatttttagagtaaagtacatcactcacaggttctaagaaaaaatatttcatagctatatgtgttgtcattattcatatatgggttttacaagttaaaatcatgggaatgctaaataaagtcctaaacaagatttaagaggtagttttaccaaaaacttcacaatagcaaagattactaaaatataagctcaacaaaattggtttgcaattttagcttttaccaataatttcttacgaaattattaagagctagaccacacaagggagacatatagctatttatatttttactgggaaaaccagtacaaaagttggtcatttttatgaatctataggaatttggttcactgaattcggagttcatatgaattagttatggatttttaaagttcatactcattcagctcaatagctatctcagaaatcgatttctagtttcactccccttttctccaacttccaccggatttcgctcacatggcaacagcctggacgtagggttgtgcgaggctaaggcctcgggctgatggcaagagacggagcaaggcctcgggctgacggcaagagacgttgcctagggctgcttcaaccgaaatcaaaagagatgaactcggggtgagttgcagctaccttctagctacagcaatggagtggatgtaacaccctgaaaattcaagacaatcaaaatcactagaattttgaactttttaaaatttttgcatcatgctggatgttatggttgcttttgcttgccaaactataaattgtcacaatggaaaattaaactaaagttatacaactaagtaataattataataataagatatttattatgaaccctataaatatttacgcacaagaaaacaaagccataaaaagggaaggttaattactaatttaatttatggatcaaatattaaatacttgaacatgtgatgcgtgccatgaaatataaacacttaggaaatgataatcgttcaaataaatggaactctatctatagaatagttttactgggaaaaaataattagatattatataatttgaattgaatcacaaatgctaaattatagaaatccatgtggtggtaaaaccaatccaagaagataaaccaatatgtgtgaaaacagataaataccaaaatcccaaatataggaaattatagaatctttaataaaccttaaatattggacagtattaaattttgggcaaattcacattgaacacttaatacggtcacccaaatgcttaggagtaaataaaaaattaatttgcaacttttctcaatttataaatcaaccaaagccttaaaagtaagaaaataggaaaactcagaaaaatatataataataataaggatatgttcaatattaaatttgaatataaattttgatggaataacatagattttgtgtgaaacacattgtaacaaaataggtggcaatagtccattttctaaattagaaaaaacatctaataaaatccaaataaatcggctagcactgttcattgccccctaggtgctcaaccctgtcccatcgccgccctccccctgcccgcgctgcgcctagccttgccctgccttgccgtgtcgcgcctagccctgccgcgccgctgccttgcgccccgcgccgccgcaccccatcgtgtcgccgtcgccgtcgctcagacgtgccgcgcgccgttgcttcgctctgcgcgcgctgccgcgccccctcgcgtcccatcgtgtcacgcgccgtcgccgtctccgatcgcgtcgcctggagccccacccctccgcgcgtcacgtcgccgtcgccatcacgtcgtcatcatcaccgcgccgcgtgccgtcaccatcgccgtcccgtcgccactgccgcgccgagcgccgtcctatcgccgcgccgcgctccatcgcaacgccgtcacccttgatccccgcgccactgctgcgctatcgcgtcaccgccgtcgccatcaccgcctcgagccccgcccgcgccgcgcactgttgtcgtcgcgctcgccatcccaacgccgcgcgtcaccatcgccccgagccccgcgtcgccgcgccatcccgtcgacgtttaaagccggccacccctcccccgagccctataaataccccccctttcccttccctccccacgccattccccccatcttctcccctttttgctctttcttcccctccaccgacgccgcattccgccgccgcgccgccgctgccatgccccggcgtctcgccgccgccacgccgcaccccgccgccgtgtcctcgccgccgtcgccgccggtccagtaagccctcccgcctcccttcgtcgccggtagccgcgccgctcggccgtgagagagagagagagaggagaaaacagagaaagcagagagagaaaagagaatagagaagagaggttagagtgggccccacgtgattagtaaatagtaatccccttcttaatctttattagttaagtctattacatgtaggtccgggtcgttaaaaatctagttatggagagtttatagtttcgagtctatgacaagcgggccctaccgggtttaatggccggtttgaccctagtcaaaggagttaggcccacctgtcatttgcccgtatggattcctttagaaagaaaagtaaaataaaagaaaagaaataggaagaccccacctgtcagtcactatagcttgtggataaggttgtattataaataaatgaattaggaacagtaccatttcgtaattattagaattaattcaaatttgaatctttacactagcataacttattcattttagctctgatttgagtgaaacttgaacctaaattcatctaaattcataagctttccaatggtatataattcactatttatttgataaaatatatttataattattaaataattaatatcaagatgatgcataatagttaacttaaaaatgtgctaataaataaaattgatattgtactgtaaagtagatgtcaaataattgtctttaacacgctttctcactgtaaaacctatgtaaactaattaggagcattgtttcaaattaattaaagcataggaaatactagtgccatttattaatatatgtcaatatataattatactcgtgacgtccaaattgtataaataatgtttagcctcatactttgcgactaaaagttgaacacacatagatgagtctttaacttgtttatgagagataataacagagctagtgtgactaaaatcacccgcacgaaattaattaacggcatttcctatacagtagtatatgtgtaggttggaaatcgacccttaagttgtatagacggtaactcactcataaatccacttaaaatcacatgtactgtgtagctcgtaggaaatagcaactattcaaataaatgattcaatattaagatattgtgcacacacctatactgtacatcccattatagctatacggtatagtattaatttgcttgttgcatatattaaattagagggactatatgacaaacatgaatattagataaatactagttataaatcttgatctcatataattatagttcaattgtaaattaggattattcattgtaaaattatgtgatgggataatctgtaaccataatatgattaacctaaacaactctaacatacaaagcatggataattattaaccttttctaatttattgtgacaagtaaaatattttcataattaaagcaaagcctccatcaataaaataataatacaaatggttccctgcgattaattgcttgatcccaaatccatccgacgacaacagaacctctagtatatgaccattttatttagatcgatgcatgtgtagccataatccttccatagcctttagctagactaaaccacatattagccagatatgtatctcatttatactacgttggctagctcctaaatagaccaccatgacaacagaaagattaagaaactttagcccttagcatgttggaatccatcagcaagcgcgaataaaatgagcaaccctaggttcgacctcatcaaatatattttgtttgtgcatatttgaatgttgcttgaatattggtttttctcgcgtattatagaaattgtgtatcggtcagttgtaaggcaacatctacaacttccaggaggtgaaggttgaacaataattatatcaagaataaggactatcatgcgcaggcaagtcatcactattctttgaacatgttgatcccaattgcgaaattattttatttacaaataaaattgcatgcaatgatgaacatcctacttgtgattatgccatgccttgattattgtttaccccttattccttcgtaaccatgtttacgtatgagtccctagtcaattatgacaattgcttagaagtgctattctagaatcatgcatacccatatttatcaaatgctatatgcttgggcaattacctttgggaaggtaattgagatgcggcatgtggagacatgagcgccacactgccatgatgttgatgacatgatttgtgaaaggagaaataaaactaaacaaccgttttcgactggggcggacggaggatttgggtggtatctggaaaaggctagtactgtccccggtcaattaaggaccgagccatgaagttaagcatgaaacgacccccgtacaaccgtacttctcgaatgggtatagacctagcggattagatagccgagcggaggcagtatccctgcatagatggttcacccctgagtgaggtaggtgcgctactgtgggacagccgttgaggtagggccgagaggcgtgccctacatcggtgtcgccattggtaggattgccatgagtgtgtgagagagagaacttaacttgaaccataatttaatatgtgtgtgagacttctctttcccgggagcgccagaactcctctcactgctagaaacatggacgcctagagtgcatgaggatttaagttcatggagcgggtactgccaatgcgaggttatcgaaaagctttgccgtgacgcgtctcatgtgttgggacgaggctcatgtgttgggtagtcgcggagtgcgggtaaagtgtacatccactgcagtgtgagtaaaccaaatctattcgaatagccgtgctcgcggttattgagcactgggacatgtattacacttggctagactctaaattcttaacttgtgtgggatgggatattgcatgatgatttttatgctgatggagccacttcctgagaggagggaaggtggacgtcctcagaaaaccatgacgactcaatggcgggaagctatccttgggatcacaatggatggtggacagaaccgtcattgtttaatgtgaacactggtactaaaatttgatcagtctatgctaggtcttaggcttatgaaaagaattgcaaaacttgctttgcgcaaaagaaccgtggctattccttgaaataccctctatcatatgcattgttgttgtggtggcttgctgagtacggttggtactcactcttgctatttatacatcttttaggagagtgttgaagagaagcccttgtcggtacgcttgcgtatccaacaagatgatcggagtgcggtctggttctaggtctcgttccccagtcgactgcctgtggcatgttaaccgggcccttatattatttggtcttccgctgctgttatctgatagttgacgggctacctggccctaatgtaagtatttaactcttttagcctgaattcattcgtgatatgttgtgattcaactatgtatgtgtgtaccaactactgatccagggattggtacggataaacacagaagatttccgatttccaaaatcgggggtctacagtggacaacgttatgctatagatgttcaacatggagggaattcaaaagaggcaccatggatgaaaaggaagctcaccaaatggaggaaaacaaaatgctgctgttgctgccctgtaggctgaaaccaccactctcttattccttctcgatctctctcaactctccatgcatgtgcaagatgttgggatggatggaaagcttggatgatggggattgttgtggtctaacatgcatggattgatcttgggctattggatggggtttggggaggagaagttagatgtgaactcagcttgaggaggaaaagaaagaacaggcagtgaaaatgaaagggaatcctttcgaaaaaaaatgaatggggaggaagaagaaggggttttctctgccccccttaagttctgaggtgggagcacgcccatgggtgtgttgtggggtttaagaggcacccaaggtcagtgacaagtggacccaagacatggctgtctatgagggtgagagaggtgggtgaaaaactgagtatagattcgttctttcaatttccaggatttattttctttccctctcatggtaaattcgatttgtctaggtaaaacttgttcaaaaattcaggaatatggtgtggtgataggtgttggtttataggttccatttttcaaagtttcacacataaattccaagtattttaaatctggtgaaaagatgaaattagttaggctgaaagttatattgaaatttcaggaggtcaaaacggagagctaaaattccacaaaatttatatttgttggtgataaataaacaagtatttgaataaattattaaacatgtatacttctattcaagttgttgttcaagtagaagtggtttcaattttaccgtttagagttaattttgttatcgcatacgatcaatttgcaatatagtaaatatgtaatctaaaagacaacaaatgcacttctaaatacctggttatgaatgtagggttgttcgaatctctctggaccgagtcgcatctatgtttagaccaaggcaaccgatagttgagccgattccgtagataaccatgggacaacatttgcctattccacagcaacagtgttgacggtccttaagtcataatatttgaccgtcaatgcctgcatataatggaataaaatgtggaaaccaacatagtggtagggattattactaatcaattccactagtgttggtgaaatatgtgtatgcagggattttaagaagaaaacacacccggcatgcaaagaaacacacctccagccaatcaggcgcgagcacacggattggagggcccacaaatcaggtgaaacctccatggaacaggccataactgccataaccgtcatcagggcccaccagtcagtgtccctaccaaaggagaggccaggaggcggggaccagggttcagccgaaccaccacagcctcctctcatcctggccctccacgtgtacgttgttgatgccttcccaatgacggttgagggcgttttggacaattcccatagctgtaaccatcatatggaggctataaatagagctctccttcacacttcacaacacacaactttgagctgaattacaagaggctctattgtatcttttgtacattagaataaggtagagagtgaggggaacccaaaaactctcctcccggcccctccttcggccagggggttgcttattgggcctccaacaacctggactatgttttggcctaattctaaatggtttttattgacttattgggcctctaatccgtgtaaacgcgtcctgaatgcgcggaggtgcattttgtcatatgacggatgtgttttctcctcaaattacctgcatacacatatttcaccaacactagtggaaatgattagtaataatacctaccactaagttggataccatgttttatttcattatatgtaggtattgacggttagatattatgatttaaggaccgtcaacaacacccccacacttaacctttgctcgtctagagtgaaggctatggactctacaatagagttatgacttccttactaacaatcatgcaaacaaattattcaaagtcatacctgtacttgaggatctttgtagtgtctactatgcaatcttgaacaattgagaaatggaacaatcttgacttaagtcaccctaacttttcatgaagaacaacttggggttttttctcaagtaacacaaaattataacttcggtttgctcctcaatttattctcttgatcactcaaggtgtatgattccccacaaaggcatatgattgtgccttttcttttcctaccatctaataaggcttatgtggagctcagagtatggaaaagagaagagcattacttgcatcacatatattgcaaagtcaaataaaggatccatggaaatactagtcatactttctagtcaagaatgtgcatgtatatgtgtgtggtaaatttgtgagtggaaaaaggaaaataaaaataactcctttttgtatacctcctcctccatttattctcttttgaaatttgggagaatgcatggctatctcttttttttcttttctttctttcttttttttttcatcatcatgctccatacttgtatgagcatttttttctttctttttcatagccatgcctctctctctatctctctttttgaaagaactttggaggaagatgcataaatgacatggagtatttattttgtggactatggatgaaatgaatgacaaatgagcaatgctaacttccagtgtagaagtcaagcattggtgggtgtatttggagtgtatgtgatcttgaccatgaaagtatgaaaagcatttcactagggtcacaaaacttgacaacgctcaatgtaatgacaagcagcgtatgtagcaagctaatcatgaatgatcaacctatggctctagtgggaataaaaatatcaatgaggagtttagcatcattatatgtttttttttctttttataaaattcccaagtgtgccacatgaagagcaggatttctatcatcagactatatttcattcattaattacctagataacatggggtccctattggatatgtcaccacaagcaacaagtaatgagcaaagaataataggcatgcatgttattttcagggagaccataaactctaattgtaccatctctagcttgagtttaattatcttcgatattttagaattgataatcaaattaaactcaagatagaatggatttccaaaggaaaaattgtgcaaacctgcgctctgtataaaacagaggacgattcacgatagaggtggttcagccgaactggaggttcaactgacccctcattgggtttgactacatcaattccccttgtgtggtttgtcatggctcatcacttctagggtgatcttgctttggttatagcgttgatgtgcaagatcacccccacacttgtcttttgtcacgctcagaaattcactagtaatttccgaactaatttgtgcatagattcctcgtccaggaatcagccgaggtacacaaactgataatttaatatacaaatctatcataataataacgttacatacttacaaaccaaaagaaaaacaacagcggaataacagtctagcgatggcttcagctccactcccacaggcagctcaactggggtataagccaaatgtcttctccttctggatcctttttcttcaactgaggttgattgattattgcaaggtgagcatatgacatactcaacaagccacacaacaaatatgcaaatgcacaaggataccaaaggatggcataatataggctcatttgcaaaagcagcatttagcaaatatttaagaatagtaaaacagtagagtaatcatcaattttaatcaacactgaacagcacacccatgctgctcaggcccaaccattctgaacaaccaaacccggctgcacagatctaactccaaaccaggaggtaaacaaattattaccaattatagcattaataattattgtgagaggtatgagactaatcacgaaaaagactgcttaacccgcccataaccgcgggcacggctattcgaatagttttactctggccagaggtgtaccactgtacccacaagacacagctccacgacatgttaccatgcgcctcaataccaccacggtatctcggaaaggaactgtgacagtacccctcgcacaacacaactcaccatagtgcaccattcctggatcataatcaccccctcaaaaaaaaaaaacagaggcatggactccccagcgacccccacggacttctcgccgcttctcagtctggtgccccgtaatgaaccatgctatacaaaaggtaaagccattgcccacgctggcttgtggttggcacggttaatgtctcacaacagtagcttgtgaaccgatccttaattgtcatgaccacgaccttcaaaaccatatgctcacaacccaccattaatcaggttttagttattaattaattatcatagcacgattgaccatcgtgagctaccattaaatataaccataagaaataatgtaatatgattcatcccattaatgagttaatgtttctaagcatggctaagcaattatatatatatagcatttagctgaaccaaaccaatatataaggttctagctaatcaaattataacccataggaaaataaagtcatcttcggccattaattaattgggaaaggctcaccacccgatgctattctaaaataatgcataaattgaaataaaacattagctttaaacgggttcagaatgctcaaagggttgtttaggatctgtgtgacttgccttgcaataatcggtcttcaattagtcttcttgaacacttccgacgcactcatgaaccttcgcaacaacggaaacgacaagctaacacgcaaaacaaagaaaaagattaataaaaaccaaataaacagtacataaaaagtaaacaaacatgtagatcatgattttagatgaatttagagacttgaacgacctcattccgatttcatatggattagttatgaattttacaagattaattccaattaaagcctattaaagaaaagactattccaaattaattaaacaatttacaaataatttatatctgagataaaagactaaaacatcctccggaaattattggaatgaatttagtagacgacatatagtaaaaaaaactaatatgctattgaaaagggataacaggatttatattgattttgatggccaagatagcgctgatgtcagcgatgacatggctaccacgccagatcgacgccggcgagcacaagaacggcggttaccagcgaaccacggtacaatgatgcaaacggagggcaccgggagagagagaggatatcaaggcgacccttaccaccacttacgcgacgacagacggcgagggagatggccggcgacgagctccgaaggacggcgaccttgggttgacgatggcgacggctttccggcgatgagcggcggcaacggaggggtggacgggctaaggcttggtgctgcgatgccgacgacggcctcggggtgaacgggtgacgaccgcaacagcgaggaggctcggccggagatcaaacaggggtggcgaactcggccttcacggtgacagcggcttccggcgggatttggcagagggaaaccagtggacggggtagagctcgaccttgcggagccgagggaggtggcggcgtaggagggcgacggcaaacggcggctggagcgactgccggcgacggagagagaagacgagcgtggggaggcggctagggttagggaaaacttcgggaaacagggggaaaccgaagaggaggccgaggggattctatttatagtcggaagagggagagatcgcctcgggaacagatggatttggtgaaggaaattaggatttatctcgagttcacccgaataaaaacggccaaaattcgtgagatagataacgaatttgatgggggtttcttgtggataagatagaggagatagagaggaatccgtttttgcaatcaattttggaagggaagcaacgaagcgaccggattcggcggagattggcgccggtatcgggatgaacacggcctctgtccagccggctggaggtaggagaagcactgtagcgagagggaggagattagactttacgctgggctgaggaacagagagaagggaggaaggaatgggccgaaaagggcccaagctgaggaggaggatttttattacttttccaaataaatcaatcaccaaaatgatctttaaattgttaaaaatacttccaatgctcaaataatttcatgaatcctgaaactaattggacactcaaagtacgtaacaagattataatcagaccatttaaggattaatttattatttaaataattgctgaactgctctttgtatgattaaaattaggaattgagctccgaaaaatccgagaaaattccagagagtataattaaccatggagaatttaataaaaattaaatccatccatgctttatatttaggaaattttatttcccacatttaacttcacttgtaaattaatgaacatataatataaattctaataataatttattaaataatttataaatcctaagacgaaaatcaggatgtgacatctttgtatgggggttctttattggacacaaaaagaaaaacaaagacatgagtgaagcacaaaggactcacttggttggaagaccaaggagccaactttattttattttattttattttatttcttttttctctttttttatggcaacaatggatatgatgggtatcctggcaggatggagacatgagatgaggatgcacatggtgtatgagattcttaccagataggtcttaccaagatttgaaccgaatgtaagaatgcaacaagttttgcatttgttctacttggttccctgtgcatatcttttctcatggataaggagcatgatataagtgtttgaagttattgtacactgctccttgattgtctttttatttcctgcaaaaggttagtggacaacaaatactcgaagcactacaatgatttgaaaagattttatcgtagcctcaagattaattgttcacatccacactaaaatgaaattggattcaaaacttaagaagcgtggatcccacaagtttgccaatattttattttattttttccgagagacactcttttttttattctgaaaacaccttttttttcaaaattttattattcaccaaattttcgtttaagcacaactcatacagggctgaggtaaatttgcatgaacatgctaaaggagcgattagtaatatacgcaccgtgcaccttgataggtgatatctgtctcctttgtatgttagcaattgatttgttcccggctctgacctacctccattgtgaattgaacttgaggactcacccgtcaatttgaaaactttcctgcaggggttagtccacagaagatatatatccaatgtctatgaacatattaactctgaaattcattagtcaaactaaactccatgtccaatttgattaaagtagactattttcacctaagcaccatgcttaatttaaaaatcctatagatgtctcacgaaaacacccaaaccagagcatatgcaaatagacataagaaacataaccatgtatgatcaagccatattcacatagtggtactattaagtaaaggtttggtgaaccttggtttatttttcgcatacctgattgtacttactgccagaatgatggataatttgaaatctctagggcagtggcatggtcacatatcattgtcgttttctcctccatcacaatgcaaattgtagcggaggaaggcaccttgaccatgccaactcaagcaagcaagttggtcatgcacacacctcaggtgcaagaaccttgtgccttgaaggcgtgatccgttggcacaatgctgtagagacgtaggatatctctcttttttgggcaaatgtagaactgccaactggagtggagcagcaaatgcctagaaaagaagagggcaactcctcttgcttgtatgcgcgaaagtgctgcgggagtgagaagttgtgcacagctaggagtggataaagcttgagccaaggcgacacatgagctcgatagagggactaggtgtagcctggcaacatgattgctactagtgagatgtataaccatatttcaaagacacgcacataatgcggtctttgatccaaatgtatctcatcagctctcttgctcttttcttcttctcccatttttttcttttcttctgtctctcttttgtcctctttttgttttcattatcttctttttttttctttttttttcaggcaagctaggactaacaccaacttcaaaccaagatgaccttggttgatggaactcgtcatgaaaagcttgtcgacctcccccacacttcgacttttgtgtcgcaagacatcaaaaaccaagtgtgtgatgtcggattctcctatcgagtgtgttccaataccaaggatcaccaaagcgtacagttgatgtagctaccatgttcttaggcatcgcatgaccctcgttcttaatctcaacctgcaatggttagcgaccaagaatacctgaaggtgcatactatcctaaaaattggttcttgcttttattagaaagaaaacttaccatgataatccggggtatctcccggtagtgctttgtttatagtcacaagcttgaccaacgggacatcgttctgcaagattagtgccacaaacaaatacgagatttgcagtatttatgataaatataagcatccacaaccatccttctaaacatgttagaaatgaggaccggaaggtggttgtggtcctcgcacagggaagtggtactaatcgaacaggactctggggattccttctgtgagcatgaatcctgggggattttgaaagagaaactttcatgctcataagtggaatgctttctctcgtcctctagagtcgatgtctcaagcttgtccgtggcctgaaggttctctttctcaagagatgcatcgtgcaagaaccgggttgtttcttgatgataaacaagaacaatgttatgagggccagagagacaaggcttaggcttgatcaagggtgatgagggtcgttcagtttcatgaagatggacaatgggttcagaagaaatgaacgaagatacaaacatcacctccttgtacgcctcatgcttgggatgagcctctttggtgctggaattattcagggtgtttccatagtcttcataaagatcacccctgaatcggaatggaatttcctgaggatgaatttcttcttcttccggctgcagcaactcgaatgaggattcagcagttgagtcgggttccgactccacatgcagaggatcctcatggataatctcgacctccgagatggctccgcttcggccaaaagaatcgttctctaagatcagatctaagagttctcttccctcgtcggttgtcttctgtgcgaacgatcctctggcggaaatatcgagatttacggcagactccttgtctaacccgtatcgaaaatgttgaagcaacatatggttgggtaaagacaagtctgggccagacttagttaacagtgagaacctggcccaggttgcaccgagagattccttctcgttctgtcggaaagagaggatgtctaatcgaagattaattacacgggttaatggaaagaaagcaaggcagaatttgcacttaagcacttcccattcaccgtggaatttcttgacagacagagtgtgccattgcttcgcttcatctctaagagaaaaaagaaacaacttccactttagagcctcatgtgtcatgcctacgatcgataaacatgaacacactagctcaaagtcccaaagatggacgtatggattttcaccaataccaccatagaaggtttgctctcgaacaatggctataaagctaggaccgatttcgtagccatcggaaaggattggttttgaagaacaggacggctcacaaagatcagcccgaggagcagaaagattttgaattgtgggttgcttcatcaagggaaggaataaaagaagaagaaataagaataaagatacgaggatgacctagactcggataaattagcaaccgttccccggcaacggcgccagaaatgcttgttggtatttcttacgaccacagataaatccgcaagcgcatggaataccgttgtagcacttcaccttcgggtgaccccaaaaggatatcgtactcagggaacgtgtgtaatctacctaaggctaagacgatccaaggacaacaactatatgtatgtgttttaattttctatgctaagcaaggtaatttcatatctgttgcttcgggcaccgacccctgctggtctgctagcgtggtttctgctatagctctatgatgtatccaaacgtggaggattactcggacgggattcagggctgtcaccacctgccgcctgcctctgacaaatccgtgggatacataacaaacaaaggtaatgatgtgcactagggttcccgatcttccgaaaggttatgataaacaacgatttgggcggagtcacgacacaaagagtcacgacacaaatcgatccggcttcttgaacgcgcacgctcttgagccccacaatcggagcaccacgtctcctctggttatcagccgtgccgaaacccggttgacctcgccgagaaggctaatccctgcatgcgaatcgaagaacacaagcaagaacaagatagattgcaaccaaattgcatatgaaggattaagcactcgaatttagggttccacaaaccgatctagcagcgaaactgttcttgacagaataatctaagcaaaacccaaaaacctaaagatgacggcgggtactgatatatatagtttagggtcgtgcaaccccctctcgacacaaccctaatgggttccaacacgatacacggcccaaaggcccaaatatggtgacgcagcaccgggacagattctggacgtcaacttgttcggtcgattcccattgactcggaaagaatttggacgtgggaccaaaaccattggaaatgttatcttcttagctttccatccatataaagaacgccccaatccgagcacatatacgacctgggccgtgcccgttttagtgcagactgatcctggacttcgaattgcacccgagatcgacttggtttgggcctccaccttgacttggacgtcctcgatgatcctccatggctctaagtccttctccaagtgtctccttgtcccctccattgttcctaatcccaatataattattaggtagcaatctattctcgaatacatacaaagaagaacataggaacgagctcaactctaaattcaattgtcgcgcacgagctcctgttatcggtccttgaatgaccgttggaggattgttgtgtacatccgaggtagtgatgtccgcatcaggtaatctctaacctagacaccacgtctaagttattaattactactctaatacttgtacaggaactttcctttttatgcagagtcctagtactatagcacttagtacgaatactagacaatgaacccgcaaagatggaaatatatcttactcagactaagtaattaaataacataagaaaggaacacgaatgcttactttatagaagaaggttctccgaacccggagtagtgtgtacctacagctccggtactcctccaaaattcctcatagaaagctacactcgttgaggtagaagtcgaatgagcgccaaacttccgggcactcctccagagcttctcctcactctctaccttattctagtgtacaaaaatatataatagagcctcttgtaattcagctcaaagttgtttgtcttggaaatgagaaggtgatctccttatataggctccaaatgacggttaggggtatgggaaatgaccaaaacaccctgcaaccaccttcggggagaaattcgagccgtccaggtgaaagcagatggcaggaagcgccaggatttattcggccgaactggtgggttcggccgaacccaaaatctctcctcccggcctctccttcggccgggaggttgcttattgggcccccaacaacctgggctatgttttggcccaattctaaatggtttttattgacttattgggactctaatccatgtaaacgcgtcctgaattgcgcggatgtgcattttgtcacatgacggatgtgttttctccttaaattacctgcataaacatatttcaccaacactagtggaaatgattagtaataatacctaccactaagttggataccatgttttatttcattatatgcaggtattgacggtcagatattatgatttaaggaccgtcaacaggcaatcaccattctttttagtttatggtgcagaagcaatgttgccgagcaaggtggaatttgagtccctaaggtttcgcaatttcaaagaggagcgctacggagaagaccgagtggatgatcttaactgactagaggaagctcgcgaggcagccctgatccagtcggctcggtatttacaaggattgcgatgttaccacaatcgcaatgttcgatcacgcgcatttttggttggagacatggtcttgaggaagattcaatctacacgagatcggcacaaattatcctctttttgggaaggaccgtttataatctctgaagttactcggctgggatcttatcgactcaagcgtgaagatggttctaacgtcgacaattcgtggaatatcgagcaccttcgtcgtttttatgcttaagaattatttgtatatactttctcctccttgactgccaacatcaagctatttcttgaagttactagtcgggggctatcataataataatagagtgtgatttttatcaattcaatttgcttactcgatttatcattgccttgtctgattttttggcttagttaatcaggactgagagttttctaacaactttagcgggttctaggctcaataaggtttgacaaaaacttttaagaaatcaaaagctaagtttaatttatcaagcacagcataaatacatcagtattgtacaaattgaggctccatcgtcaaagattacatcatttgaaatcagtcagactcagttttttcatcatcggattcatgagacccagtcggaccaagattgttatcttgaaatctctcaacaacatcagtagcgatcttgtcggcggctttctaggcatcatcgataagatcaagggcatcttcttcacttgttccgtctgcaaagccatcaacggcatcaatgtcgatcttcggatacaaggacttagtcatcgctagagccatgcttgctcccatgcttctagcctctttaatattcttgaagtacatgtccggagcagctctcaatttatcaaaaatttcaacatcatcgattgtgctcggaccgttgttattgtagaacatggcttaaatcagtggagtagcagcattggcgacttcgcttctagccccttcaagttttttaatcttgttgaccaagacttcaaactgagcatgagatttaatcttgcgatctgcgtggaataattatatcagcgttagggtgcaaagacaagattgtttctggagttttgactgcaattaccttcgacatctttgagggctgagtctctttgtttggtaagatcacccttgtccttttcaggagctttgattcgcttttccagctcggtgatcttggcagcttggactgttgtacatcccggcggttagtcggaagcaaatatcagcttgaagtaaattgatcaaggacaggtgttatcttttgatgaaccactcagttcaaagttggcttcttgaagtgcagcaacccggtccctgaggtcatgttctgtttttctagccagttccctggtttcatgaagtttagctctggtttcttccagagttcccagatgagggaccagtttctcgagggttgcggtttttgcttcgttcctcaaatgaattctctgtattaactactcggtcatttcattaagtctatcaatttgatataaaggactacggatagagtacttacattcacaagacgagtggcctgattaagtgtcctggttaacaatgacaccttctcgtcttctttctgcttgtttattacaatgccatgtggctgcatctcgtcattccaccacttgactaggataggtggtcgggagtcttcagccgattggattcgaagaatttcttcttcatcgccaatcgtcggacctttatacaggcacaagagaagtcaagcaattggggaagatttttctaaatacaagtttacttagaggattgttacctgttattattttcggtggtggtcgagcgggtccttctaccttatcaaaagcaccaacttccggatcagcgttagtatcatttaagggagaactactggcttgcccctccgactcagggatatcttcgttttgctcaccactcggctggtttctagtcggaggctcctggttagcgcgggcttcagcattcgctgactggtttccagtcggggctccttatcagcttctacattgccagttgccgactgatcgccagtcatacggtcttttgtagtcggttcggcctcactagcagcagaagaaacagcctccttgttagtcggttcaggattttttccaaatggatcgatgtcggatgatttcctataagttgcaaaaatgctattgacatcattttgaagaatgaaggagaaatcacaacggattcataccttgatgactttctgatcgtgggtactgcccggctggatgttttcttcttcgatgggttagcttgtcttggccgcttcccagctgtctccttgttgccggtcttctcaatatcatcgtcctcatcatcactcaggaccattttcctcttcctgggtcctggttgctcggttggcttttggctgctggattgagcagtcggctagatttttggacccccgctagcttgaccaggttgtcggcgaggagaacagcactgagcagttggtggatcggacttcatcagagaaaattcctgaagacaaaatttcacttcttgagtattattgcacgagatgacgagattaaagggatagtcagatgattagatacttaccgaaggaggagggttgaaagcattttatggcaccaccggcagtatgtgcgagtagctgaccacgatgccggacaagaagattttgtacatcctctctttcataatcttgaaatcgagggattctgggtcttcgcgattgggatcatgtttaccatcaaattcaaaggcggtgcaggatctttctttgataggcaccagtcagctctttatgaaatgtcgggtaatttgctcccctgcagaccttgctccttgagcttcagcatacgttccaacaaagtgagggcttgagaggcttcatctcctattgggagtgagttccaggtttcttgatattttggaggaagacatgaatattcaggcaatgccgactcaggattttgcacataaaaccaatttgcgtgccaacctttgtttgatgttttgaaaggcatggagaaatatttctggcttagagtgcctctcagttgaaaaccagctcccccaacaacacacagtttgcttttgttcggctggggctttagagtgaaaattcgacattcggcattaatgaactgagctgggtctgtgtagtcgatggggcccagaaagaactggttttggtagcgcaaatcagggattgcaacctgatgggaaaggtgctacaatagaaaggggaaaaaggggtcaagattgcaatgaaagaatcgcgtgcaggaaaggaaagaaccaggagtggttatagccaatagcacttacctcagggaactcagccaccgaggcacttgagggattggcggaggccatcgtcggaatgccgagagtcgtcgaaggcaaaaggaacacctgcaaagtcgctgagaaagccgacggaaaaagttgggagtttcattgattgaaagcaaaggaagcggaagggacgccgtgaaaatcttttcgagagggtggttctatttaaagggggacgtggcaacagccgaaaatagaaaagaaaccctagatacgaacggaaacggaatcgagcaaatccgcaacatccccaaatatcgcggacttggggggcatgtgttaacgaccaaatttggtatggccatgggccggattcaaagccagagtcaatgcagatttggaggaattctgttctgggaaagcagagtgtgtttcggccacgagcggcattggttgccatatgtatcggctgataccaaatccaacgaagacaatccgatgcagccagtctcgaaagatggtcctgcaaccatcatcgggatcaatcaaagcacttcaagggcattgccacggaaggattggagtccaggaaagggcatttgaatctattaattaggatatttttagagatattttcggtaagagtccgcctaagggactcgttcgtattttaaattgtaatagagatagagtcgtgtccagcaaggacatgttatgtacttcgggtataaatatggcccgacaccttgtaaacaagggacggcagttcaataatacttcggcgcattgccacccttttctttttttcattgattcgacgagtttttgctttcgagttgggctgcatcgagtttgatctccgacgaagaggtaaagcttgttatggccgtggtttgcattctcagaattagtgcttacatctctatgacactctaatcctgaccgtgtgaattgccgagttatcatatacgatgtacaatctagatcgatctcgtcatctaacctcatcggctagcttctatcatcgaaaacggccgatagatttagataacgacattgagttagattatacagtgtatctaccatcttgaatgagttttcatcgttttgtttagattttacgtttctcttcatacttaatgctgcaccggttaggttcgatctgttaagtaatgtcttgaaccgtattatctagctctttctatgaatactaatagagatagcatcggagtttcagccgatcttacctggtttagttgtcttgttcattatatggtccttgatcttctaaatgtgccctttatattagagacaatccaaaaaacacaattgacaagtgtccaaatccaagaaatgccatcgacaagtgtgagttccaaaaaatgccttcgtacaaacgaatttgtcccaaaaatgccatcatcgttaagctttcgtccatcccgcgttgttcagtactataggatgaacaatgtatttaacggcgcgggatggattgaaccctaatggcaatggcatttttgggataaagttgtttgtacgttggcatttcttggaactcacacttatcgatgacattttttggttttggacgcttgtcaatggcatttcttggattatctctttatattaagatctgacttatttgaagtatatcaggctctctatcagactgctagttcatcctacttgttagattgattacgttttatatatttcatctgtattgatatcttagtataaggtagtatcagagtactagccgatacacgttaggtttgctctatcggctatgctgtgagtatacacaatctctactttgaagcacatttagatattaagtgatttatactgtctcggcataccgtcctatctatcccaatcacttggtccaaatgtatttcattggatagactgtgtattgctgacatctacagctgatcgagtatatctaataatatcaatgctttatcttccctcgccgatctaatgcaagttacatcggcttggctctgaacgatatgtcatcggcaatccagccgatcggctatcgttgatgggtttaactttgttcttctttgtttcttgttggttgcatgatcaaaccaattatcacactcagagcccgaaagcaatgtctttggacctgcactagagttaagcagatctctcaggccagtgcgtgttttctgtgtcaacaataatgaaataaaatatggtatctcaacctagtggtagggattattactaatcatttccactaatgttggagaaatatgtgtatgctgatatattaaggagaaaacacactcgtcatgcgagaaaatacacctccggacaatcaggacgtgtttacacggattggaggtcccatatgtcaatcaaaaccacttagaattagtccaaatcatagtacatcatgttgggggcccattaagcaacctcccaaccaaaggagaggccgggaggtgtgttcttgggttcggccaaaaccaccagttcggccgaacccatcctagcgccgttgatatctattttccacgtatatgctcttgatttattcccaatgacggttggagggcatttagtgtcgaaactagatttcggaaatactaaaaggggtagcgaacaagttatgaaagtggatgggttatgagacgaaggatttatataggttcaggccttctcaatgagaggcaataccctactcctgtccagggaaaaaatccgccaattgtggtattgatctgacgatctgatgtgtggttatgccctcaagcagccccggacccatccttacataggtagaggagtcgggattacaagatagaaaccttgtcccttacagtctaggttctatagataccttacaattataaccgactaagactacgtgatatttccttgacatacaaattaacatagtacccgtctttacatattctattactatgagttacccccgataaccagtcgggtaacgtagctctatgggtatatggtacccataatctccagagtagctcctgagacctttatagatgacgagataatcttctcccgagtggtttagtagaaagacccgagttcttcaatcatctttgtcacagctcccgagtacttcaatcatctcgagctatgaagggctaaaaaataaaaattttggtgcatcgactagatgcacctaattaggtgtagcccccccgaccatgtgattagttgaacaaactaaacatatagtcaaggataaaaataaacaaccaaccaagcagtatggaatgattacaatcatcaaaatgacttaaacaaaacataaagcatatgcagctcagatccctaaagcaatatgatttagagtatatgccgactgtaggatcaaagaggccgactagagggggaggggtaaataggcggttttaaaacttctggctaaaactgagctttgtatgtggaatcgtaaatcaaaacggttttgcacaattcaaaacctaaaccaactagtctcaactatgtgcacaaagaagctaggctatgttgaggtttgcaagccctagggtgataatagtacaaataaactctagtatgtaaacttgctcaaagtaaatttgcacaaaacaaaagagacaagtgacaaaggatttttccacccgatgttcggaagcttgccaacttcctacgtcaccgttgaggcgagcccaacttcaccgttcaaaccacgaaaccaccgcaagcccccttcgttaaggggtgagcaaggtgggagccggtccacgaaggttgttcttcctccactccagagatggcgaacaccgagccactcataatcaataccgggcctcctccacaaccttcttggagaggtcaccgggcaactccaccaaaccatctaggaggtggcatcctccaagagtaacaattatgaaccgtgagttcctctcgacactcaaggctgttgttggcccgatctttcggtgagttgtgataactacgatttgggagaaacgttgatgatccgactacaaccgtacgagacgttgtgttgcgccttagcgatcaatacacctctccgtgggttgttgatcttgtcggtgcagatcaaccctattcctgcaagcaaatcgaagaaacaagcaagaacaagataaaagcaatctgatattgcaaataggaatttaatacaaatgataagttggggttccgaagaacaagcagacagatggtctagccgacacgcgcgctgcaagcaagtagcaatggctaaactttaatctatcaaaacccgagaaaccctgaaggggtaactagctatatataagggtgggaggacgacctaggggtgcctagggttgtgctccaccagcttggggcgcaccccacatgggccccacctgggccggggtcccaaatgaagttacaagcccacaggctcatgataggtgacgcagcaccttgtttcttcatctgtagatgacttggatggaatttgatgatgatgccagatccgttggaaagaggacttcgagagctttccatcaagtactcatgggccgaaaacggaggtcgtatgcagattcggcggccatttgaagtcagcagtgtagcaggtagccgaatctgattccagcacttggaggacttgatcttgatatcatcttgttcatccatgatgtgagcaatggttgtatccatagtagccatggtcacatcatcctccccttcttcacggaaaaccgtcctcggtttttccatatggtgctcaacgcgtggtcgatttaaaacaacctatttcatcaaatcaaaacaagacaaactcgagataattttgttagcaataacatttctctctagcttgcatgttttatccacatgtataggaggttctaaatctgaacatatgtaaactctacgcaccaaatatattcctctatcatcagattcgcaaaatatatgaaaaatagcactagttggacaaggcaaatcagacttagcaaataatttcttcttcaaattatcgagctcacaaaaatcatcaaactgaacatagcccaaaatatttaaagaagatagcaattcacattcctgtacatcattagcaatgtgaataacatgcttaaaatcggcacacaaagaaacactaaaaatagcatgttcattcactagttgtggtagggatataagtgaaacattatcacacaactcttctttatcacaaggaacagcaagtaaatcaacttgtgacaaaggcaaatcagaagtagtttccaccaaaatttgctttagattagcatggatagtggacaaatgtgactcatcagaagcacactcaccttgagtaataccagcaccatttaatttaccttttatgccctcttcagataatgtaggcgcatcagtcttctcttcttccttcgtgagtgatggagatgatatctcgagcatattgctcttctcctcatggtgaatgttctgagctccctgcaaagtgtcagtaataggaggcacaagcatagtttgtttctcccttgggttctttaaaatattgctctcaacactgcaagcaagcatgaacaagtggcctatatgattatatgtcacattaataagcccatctgaatatcagaattaagccctctaaaaaatctagtcattgtattctcattgctttcttttaaaccactataagtgatacaaattttaaagttatgaaagtactcccgcacggttttgtcaccttgttttagatgttctaatttctcaaggagagtacgtttataatatgaaaacacaaaatttttcctcatcattgttttgcattcatcccaagtttcaagcttattgccaacggtgtaccaccaaaaagatgcagaaccggtacatttattattagcagccgtaatcatttgagcattagagaaatcatactcatcaaattgtttgtctactgctatctcccaattaacataagcggcggaatcatacttaccatcaaaaactggcaatttagattctacccttgcaagatcattatcatgtacctcatatgtgatgcgtgaagaagtcgctatatctcgttgatggtgaagaagtcgatgttgagcatgaccatctcgtattcccttgcgcaatcctgccatggttagtagcaaacaagaaacatacacaagaatatgcacgcttttatcaactactaggtagtggcagctgaaatatcacacacactcaagcttttcccaagctcttacaagttcttactaaagcaagcagaatggtgacgtacaccgacttaaccaagcaccccaatggaggttggatgtatcgatgccttcgcaaacacttgctgtacggctgcaatcagatctgtggagctctaggtaggcttaaatatgtagcaaagggatagcaaatgctcaaatcagagaatgcaaagttgaatgatcgttcaaagtcaagtaccgtgctggtcctaggctagaacgtactagagacgcgagtctagacacaaacgataccacaagatagcactagaaacaattcaagcacactctgatatatgaaagcaaactcaaggatacaactgatttttctcttttccttctttctttctttcttttcttttcgtttttttgtgcggcttttcttttcttcttttttttctacacctttctgccttttttatttctttttttttgatttttttaccaaaaacggactcaaggacctcactgtaaggttatagggactcaactgtaaatataaaaattacagggactcaaatgcaaaagtccatatccaaatttagaactatacaaaaatggaatgctgaatttatgccggttccgtttttccaaacggatcacgaaaccgacaccaacaaaaaattcaccaaggtgtatgggctggcacggtgtagattaaccgtgagggagggagggaatcggactcagtctgtggtggtggtgggcggcaatggatggatacggcaccacggagttcggatttggtgagagataaagggaaactgatccaatctacaattttctttccaaacccaacaaataacaatctaatttaatctctcctttccatctaccacaccccttccatctaccacacgcgcaacagcaacaagcacggccgaatgcatacggcagaccctagatgcaactcagcaaccccaagaccgaccgacaaaaacttctgaaaactacaaaaatggaaccgtggcagtgagccgattccattttcgtaggtcccgacgacaacagagacacgatgacggtgacgacagtggtactaaacgtgaccagaactcgaaactctaaacggactaaacgctaagaccagcaacacgactcaaagatgtaacgcaaaactcaacaaagcaaaaatcgaaatgaacaatgcaatggcacaatatggctaggtaaatgatgcaattttttttggctattttctggttatgggtagataaaaactcaccgagcaacgaaagctctgataccatctgataaaccctgagttcctctcgacactcaaggctgttgttggcccgatctttcggtgagttgtgataactacgatttgtgagaaacgttgacgatccgactacaaccgtacgagacgttgtgttgcgccttagcaatcgatacacctctccgtgggttgctgattttgccgatgcagatcaaccctaatgatagaggaatatatttggtgcatagagttttcatttgttcggatttagagaaacatgttattgctaatcacactacttcgagtttctctagttttgattggatgaaacaggttattttgaatggactatgtgaagaacaccaaatggaaaagccgaggacggttttccgtgaagaaggggaggatgatgtgaccatggttactacggatacatccgttgctcacatcatggatgaacaacaagatatcaagttcgagtcctccaagtgccagaatccaattcggccacctgctacactgctgacttcaaacggccgccgaatctgcatacgacctccgttttcggcccatgagtacttgatggaaagctctcggagtcctctttccaatggatccaacctcattgccaaattccatctcagtcggcagaaactgaagaaacaagttgctgtgacacctgtaatgggcctatgggcttgtaacttcgtctgggaccccggcccaagtgaggcccatgtggggtgcatcccaaccaggtggaggacgacctagaggacctcccacctccttaaatagctaggtagccctttagagtttcttgggttttgatagattaaagtttagccattgctacttgcttgcagcgcgcgtgtcagctagaccgtccgtctgcttgttcttcggaaccccaacttatcatttgtattaaattcctatttgcaatatcagattgcttttatcttattcttgcttgtttcttcgatttgcttgcaggaatagggttgatctgcaccggcaagatcaacaacccacggagaggtgtatcgatcgctaaggcgcaacacaacgtctcgtacggttgtagtcagatcgtcaatgtttctcccaaatcgtagttatcacaactcaccgaaagatcgggccaacaacagccttgagtgtcgagaggaactcagagttcatcaaacaagtataggatgcctaccaaagatgatcaagtgtaacactagatctaatgtttgtttgactatgcctttatgcaatgaattgttggcggtggtcttgacatcttaaataccaacctttttttttcagatgcaatacaagtttttgttgtttttttttgttctaaaagtttttgttgtttcacagcagaaactggacattttgatgatggtatacacaaatcaaaatttatggtgtgaccagtgacaattgctctttctctattcttgtcttcccgctccatactctatccaattctctatgaccagaaatgcgtagaattggtacctcaggctgatgcactttaaaaccatttgttttgatagtgagactgcgagtataaatcacatcgaagcgcggttgaaggggagcataaagaagtgaaacattgagctttaaattcttgcctgtagcaaccgttgactatgaacatttggtgttctttctaagaaatgataaaagtggacaaggccaaatggttgaagttcagtttgcacaatgaccagtaaaaaaattttaagaaattttcttgtgcaattaattaatcttgaatttatttttacatgttctcatctgaaaaacatggttgacttacgaatccatgtttcaggcgctacgcacattattgaaaataaactcttgaaatgcctaaacaattgagcataaaaagtccaatatttttacttttgttgttctctccacttctcatgtaaaaatgattatatatacatacatttgaggcacaaattttcatttataaatgataattgtgcttatccccgttgcaacgcacaggcactcaactagttaattattcttaaaaatacctaaaagcccgtaagctaatactctttggtcgtaattcaaggtgtctacttgaggattgcatgtatatcataatttaaattcattttaatttttttatcaagacatatcataatttaagttctcaaatttgtaattccaagttttaaaaaataaattaacaaacaaatgttaaacctagaaaaaaaagaccaccaaatgaaacaaaaacataacaaaatatactctcttgggattcaaacatagacaaagcgttctgtcttttataatagggttaattggatccatactattgtagatttgactattcagaaaaataccattataattcgtttatttgtagccgtgccactgaacttttacaaaattaattaaaaccgtgccactaccgtaacattttccatgtattcccttcattttccatcttcttcctcccttctcccgtcttcttccttcctggccgtggcggacagggtgtagttccaaagcaacgcggagatgacggtgagcttggtgctacaaagctggccggtgcagcacactagccgcggcacactagcccgaccggcatgctcaggagctcgccgctggagccgcatggcagcgcgcgtcggcaacagctccggtggcaacaggcaccacgcttgcttttgcgtcggcaacagctccagcaaggagtcccttgttccacctcctgtactagcctatggtggtgttcttttcttctgaaaatgaagatgacgatgaagatgtatcactggattcagcaaccatatgagcataatgatgcctgcctcaccaaggcttgctcgagttcgccgcggactgaggaggagaccgacgctgccagcgaggtggggacgcgcggatcggccgcgggaacgggagagccagcttgctggcgccggcggcagcggagtaggcaaggcgctggtgctagagcccgccagatggaggaggaagaggaggcgaggcggcggccggagctggcaggagtcatcgggagcaaacagctcaccgcggcggtcgggcaccacgccgagcagcttctccatgcagcaccccgcgatggcggcgaaggacccgccgcgcgcgccgccgcggcgacgacgccgccgactacgccgaagcgtgaagccgcgcggatgacgtggttgcgcttgcggctgctgctgctacaccacccacagcttcgtggcagagcccctgaagatggggctctgcgggcaggcacgccgccctaacgacaggaacggcgagcacagcgttgccgctgtggccaacgttgatgccgtcgtcggctgtgccgacgcgtgaagccacgcggacgctgtgctcgccgccgacgtagcagacgcactcaacttcgctgcgggaaaaagaagggagaagacagaagaaggaagaagacgaaaagggaagggaatggataaaaaatgtgatggcaatggtacggttttaattttgtaaaatatcaatggcatggtttcaaacaaacgaattgtaatagtatttttctaaacgcgcaaatttgcaataccatggatcgaattaaccctttataatacgcgcagatcctagataacgtggcaaaccgttgccaccttaaacagggcatcagcacaatgcatgtggcaaactctaccgttgccaccttaattttttcaattagtatttggcagtctattcttaaaaacaagttttccaaaagggtcaatttatcaatttttggtagaaaataggacactctacatttgtagtgtaattatatttgaaaggttttaggagaactttttctgtcaaaactcaaaagtagtcccttctatttgtttggaccagtcacaccccattaggccattaaaccacgcctaccgaaaaccagatacaaattctgctcaaaaggtctcagctttcaagccttagccagttttttattcttttgcccttcttttatttttttaaaacgaagtcatcttcattattcattcgagataaactttttttttctcctgaggaaactactatccgacggtactacaatttgttacaatagaaaattggtaaatcttagtagtcgcctaattttggtgcgcatctgagtttacagatcggtgttacataaccacgtataacaccaacagaggatcatctcatgttgccctctcttaggacatcaatcatatcatataatttcttgttggcaccagattgtatctgcagtaacagtagcaggacagttaacttatttgccactagcacgcctaagaacagagaaatttatatgtcacattccatgaacagtaactggattctgacctttttatggagaaacagggcagcatccacagttccctctgcgtaaattgaacggccacatacattgtgttgaaactcaaatgaaactctgcataaataaggggtatcacctcagtacgttgtgcttgtcaaggctctcaatagaatccagcagacctaggaaaaggtttacttacgtctcatccggtgaagtgagatggtacatgtgaaatgcgtgaccagaaagatgttcttctgggacaccaaccaatgtaagctgttcctgaggatcccggacctgcttaacctacaagaaagacatgtagaccagtgtgagagtttgtgaagaacatctcaaggaggttttggttatgctccaacaaaactacaatgcaagaagctgcttcaacaaaactagatatcagccttaagaccattagcctaataaaagtgtgttcgctgctgatggatgggaacatatcaccccagcacggaaaacggagcagtccattagcgcatgattaattaagtattagctatttttttttcaaaaatagatcaatatgatttttttaagcaactttcttatagaaactttttacaaaaaaaacgcaccgtttagcagtttgaaaagcgtgcacgcggaattcaagggagaggggttgggaacccttgggtccgaacacaccctaagacatattagatccaaacaaaaagcgagattttacagtacatcaagcaccaaccctaaaaggtactgacaggttgtccaacactgaatttgcagtgtgcagcatgttactctgagagacagacattgggacaagtaaactagtactactaattaaatctaagtatctagtatagctcattcttgaaatggaacagaagatgcatgcttagtttcttacataatcgtaaactgatttttacataagagaaagcaaatggcaatcctctaaaactaacaataatctgcgaaagacagatatgacaatgtttcataaaaaacaaattcaacataacgattttctgaccatgtaagcttccagttaacatttacctcgttcaagttaaatgacacacccaacttctgaaagcaagagataacagctttggccgtgccagaaatgtccaattttgtagcttgatgagactccatgacctgccaattttgttatttcaaagaagagtcatgggccactgcaaaatatgaaactaaagtatatgatgtacattcagttataacaatagatggattccaatggagacaaataagataaacctactcacaactggatgtgattccaagagccaaaccagaatgaataccacacagtggagataaataagataaacttactgcctgagttatccttatcgactaaacaaatgaatgcatcctgctggacatttatactaaaatactaactgtactttctagtatgtaaagggtgaaaactctaaatggtttaataagctctaggtctgcgtctgacaagtaataactgtggacccccgactctaaatatgtcaagtactaaatgtgttcctgcgcctataactacatctccctaagtagtaaatgtgttccctgaaactgtaaatgcgcaggggcctggtagcaccgttgacactgaatagtagatatgtattttttatagatcatttagctagtcactatagagttgtcaatccaaatcttctgtgaagtttcaatttgcaagaatctgtgcttcaaagtgaagttccatagagcttaacatctaaatagagtgttgacttgtcaagaggaggcacttttcaagtgtaagtcgtatgtgaggctgattccaaatagcttatgagtctaaccatctcagtcataaattttgcaaagactaaacccctgaaaagttaactttcatgtggcatgtacagttgtacaagcacaggcttacaattctagctccaccactgtggtttaggactgaagcacaaatgcagatagaagataggcatactcagggtgttaacggtagttaattcaaatgattagaacattaatgcatcatacatcataatggttaccaattaacagaaatatcgctgatctttcttccattttcctacgatatagctaatttctgcagttcctaatgtagcatgtaagttccacatggatactgttccagtggtttggttcataagttctctaccacttactagttactccactcacttaaaacttccataccaactgaaattgctgagctaaataccatcatgattctttaataaacttcctaacatcaagttaatatgataaagttttctgtttgcacattattgcaagcaaattactgagcccataatgaatacaagtacacaactcatatcaatcaactgaagcaccaaatttgatgttgaatgaagaacaaagagacagttataatgcttgcaaggaaaaatcaaactatacctctagtttgtaacctgaaaatgcaccggggaattgctctgccatgatttccatggcagcaagaaacgcgacaacctaattggaaggaaaaataggagtaagcagtattaataaggagaagatcattagcttgaccatgcaatggaaatagttatacctgcttccccatctgtggggatatcacagcatacacgtttgcgtcctcaactgttttgtgcaacagttgcctatttccacctgttgtgcccataacaaatggcaatccaagtttacagtaaagctcagcattagctgcacatcaaaaacaccataaatgtcagattagcagcaataatagtgagcaaataatatgaaaataaggaacataaagcatatcagagagtttaatttaattaactaactaataaataaaagttaaaaggctgacataagatgaagagcagtagcggctatcctgccaaacctacttccgatagaatatcaactaaggaagattggattctgtagttaaatattcctgtttctttttgtacagttgcaaacagaacaacagacaaccatacatacataagctaacgggatcattataatcgaacatacaacttaatgattacaacttgctcttctatccattcatcaaaatatacgataattttcaactaggttcagttgtatgcactatgtagaagaagctcgagctgaacatgagatagggatttgtctgatataaacaaccggcagtttttgctgatgcaattacggaatgcttacttttggtagagtttagcatataaggagatcaagcaacagaaaatatttatatgctcaccattaacagcatcaggaacagtgtagtcaacaactatcatatctgggtaatccttagcaatcgaagggagaatactttctccttcagatgggtcacgaatataaatttccctatcacaaatttcaacctttccatcaggaacctcaatagcactgaatgatacaggaactaactgaagaccagcagatacagctgcttcagcaacagccttccccattttcccagtacaactattcacctaaacaggtaaatattggtataataagtgaaatctgagataataaaataatggatctacaggaatgtaaatcatagaagcagttaagcggtgctttaatgaaaattttggaagtaattactaatcttagtaacttcaaactcaagcatcacagtatgatgtggagatgttgcaaggagaaaaattcagtacgtctggatcttaaatttacagaacactcaaacaaagtaaaaaaaaaaaaaaaaaaacaggtcagctcaacacgatatatgattgttgacgtgaaaactaatgaaaaggtaaaacagcagctaccagctttttaatatcgtgtgctaatcatagtaactgaaactaaacaagcaatcgaacctgtcggacttccatttcatggtgctacgcacccatttctatatatgaaattgctttataggatattgtctggaaactgaagtactgaatacaacatattaagtgactcaggcagctaaaaggcaagtttgattgagtttttttcaatgctcttttcaaaagcatattttagaagggaggaactgtgaactctatcttcagtaaagtagtacagcggttagattttccaaactctatatttttgttgtagtataatctcaaactgaacatcttttttatgtgcctaattgagttggtcaaacatcccaaattccattccactaccttcttgtcgagcagaaagcaactaactatcagtacatcctccagctgcaggaaaccaaccatgtgcaagaaatgggataggaagaagatgaacgatctttggcacagctgactcgagccagcctgtcccgattggcaaccccttgcactgaacccgcatcaagaattgagaggaagaaaatgaacaggagagatggaaggagaccaaggaagaagatgagggtaatttgttctaaaaattttagtaaacgcatcaaaagggtatgtagtggtatatttccaatacctaaaaaattataaaggcatggctctaaatagttgaatagtagtggcatatatcaaaactgatgaatttataatggcatggattcaattaaccctaatattattgccaacactaattcataatggctgaattaaggaacagaacaggaaaaaaaaagtaaatagatccctttattgtgttgataatcattttgcagccatttctcctttcctacatttcccagtttcggatggaagataatcataattaaagtaaacactaacaagtactccttaggcaatgccaaaggtacgagttaatggccttggcctgtttggttggcagccaaaggttgcaatgccaaaccttaggcacgctgcatgacacaatttgttagcctagtgcttagttggtcggtataattgtggattgccaaacttcgttagtttttatcaaattgcattttgtgtggcaatgcaacacatctggcaaagtgaggtgtgtggacaccaagcaaaccggccctaattcctaaatccacaacaagggcagagccaaaccaagcaaccttaccagtatcgggaacgagtgcttgggaggcgccgcaggggcactctcgaggctctggctagcgagggcgttcgtgatcgaaagcctcgccattggaaaccgccgcctcagcgtcaccgtgacgatttgggaacagaacggcaggcgccagcggatcggacctcgtcgcctggcggctgcagcggcagcagggtgcgtggcaaaggtggaggcgagcatttgggtaggtttctgggatattggtagccggaggagaggacgtagagcggcggcgaaggaggaggaggaaggtgagccctgcccgagtctagggttttgggcgatttggcgttttctttttcttccttgaacggcccattcaaaacccggcccgaggttaaaaaattcccgaaggcccaaagtctatattttgatttaaacccctaatggtggtgtttgaatctcctggagatgaagattaagtatttcacgcaaaacgatgtgataataacgtgtgattaattgagttttaattattataaacttgaaaaatgtattaatctgatattttagaacaactttcatatagaaagtttttgcacggaacacactgtttagcagtttgaatagcgtgccatgagtatccaaattttaatccactcctttaagaagaaacgaatgggacctatttctgcttattaggatagtaatcttttggaatatgatattatttaactagaaaaggactgtgcgttgcaacggaaaacctaatcgtttaggttcatggcgccttgcatgtgtagtattttgacattatggatcatgatgttgacccacatggcaagctatcgtgtagcgcttgcttcacttgattgcaaaaatctcttcgaactaataaatggtgggtcattgaactgaatatgatttgtcgcgtgaggagaaatatgacagcagttcaaaattcttaatgatagcattagtctggagataacaaggatccacctaggcactgaaaaagccaagccgccagatctgcattcaaattcaatcaggattgcattgtagtcaatcataaatctaatttgatcatacatgtttaaaaagtaatatatgtatatacctttcaaaaattgcattagaattttcatcaaattggaagaatgggtttcctcaacttggtgaacctcgacaaaggaataatataatcaaatggaaatttagcctaatttaattcagctttaccaatttacacgcagataccacacgagtaggccaatggcagacaggattttcatgatgtgtattcaagatttacaccatgacatttagaagaactattctttgtgttatcaataaaaaaaatgctagtttttttaataataaaaagatgataatgtgtagaaaaacatagtagaaaattatatatatattgccgttttaacatgaatttcaccgtgacatttgaaagatattccttatgttatcaataaaaaaaatgcaaagttggtgataaaatgtagaaaaacacagtagaaaattacatatattactggtggtttaataataaggggcaattgtgttcctgcccttactttctagttcaattatgattttatccctactttttagggtttgtgattttgcccctacttttttaaatgaagcaaccgtctacccttggttttgacggtagttaggtgggccccaagtttctgaatcaaatgagggaaaaaacgatattgtaatttgtgaattaccatcatgcccctgatttcactaaatcagtctaccacgtgtgaatcggcatttccccaatcgaaaaacctagatcgaaggcggcgcacgcgaggaagcggcggcagagacgcgcagggaggcgcggcgtcgcacgcgagcaagcggcggcagcctcacgggccagcgcgcaggaggctaggcggtgcggcggcctcgtgggcctagctcgcaatgcggcgggccagcgcgcagggaggcacggcggcctcgcgatccggcgcgcagggacagaggcggcggccggcggcgggagcagcaggcgcaaaggcggcggatgggctcgcgcgcggcccgacggcatgcccgcacgacagcaactgtgttggcaacaacattttgccattgggtgcatctgccgtagaggaaggcgccgagtgcatcgcctcatgcgccgcctccttgatggttcattttgttgattgaattaactggcaagcagctgggataaatcattgagggctctgctatatgtgtggatttgggattttttttttttttggctctggttctcctttccttttcctttttcatgaaaagttgggtaataaattgatttgtttggaaaattggtcgccttcttctttctttttcccttcgtgatgtatatatgtgcaacttatatgttcctgaaaaactggcaataaattgatttgtgtggaggtgccatacaatctcaaagttaaatcttttagtatgcatgccagatccatcgccgcatgcatgacacaacggggcaaaaacactgcatcctcacaaagaatgcaaagggcacacctgtccttctaccactaaattaacaccattaaggggacttgacagagtaggggcaaactgaagcttcggtttgaaaaaacaggagcaaaattacaaaccttgtaaaatcataattgcaactcgaaatagggacaagaacacaattacccctaataataataggaggtaataaagtgtagaaaaacacattaagaaattacatatattgctggtttaatatgaattttcaaacatatgaatgcacttttaaaaaatataatcagcttaggagagaaagaaaaaattggtgaggataagcagcatctacccagttcaacaaatggttttactcattcatcgtgtgacatatccaacaatacaaaatcatttgttgagttgtatccgacgtcacatagcccgccgcgctccctccctctcttcgatctcattcccctgaaatcacgcaaaatcacgcctaactccacaaatgacgccgctgtcgccaccactcagattcggtgcaccaccttgcccgtgagcccatccacacatcggcgccccctcaaccctagcgtcattgttccccttgggctagcggaggcagtggctggttatagctttataggactgttgatgtgaaaaacacacactggcctgagagatttgctttactctagtgcaggtccaaagaattgcttctgatttctaagcgtgccagttggtttgcaaccaacaagaaataaaagagaaacaagaaaacaaagttaaatccgtaaacgatagccgatgacatatcgttcaatattaagccgatgttatttgcattagataggcaatgaagagtaaagcagggtaaagttaaatctactcgatcgggtgtagatattaatgatatataatctatttctaaaaatatgtttaaaccaagtgattgggatagatcggacagtttgccgagacagtataaatcacttatgtttaaaagtactttgagatagagattatatatattcatagcatagccgattaagtaaatctaagatgtatcggctaatactccgataccactctatcttaagatgttaaaacaaacgaaatacactaaatatcaagcttaatatattttaatgcaataagatcttaatataaagggcagatttagcatatcgagtaatcatataaggaacaagatgactaaaccaggtaagatcggctgaaaccccaattctatctctatcgataatcatagaacaagctaaatattatgattctagatattacttagtagatcgaacctaaccgatgcagcataagcataaagagaaacataagatctgaacaagatgatgaaaacctctttgagatggtagatacactatataacctagatcaacgttgatatctaaccttatcgactgccttctgatgatagatgttagccgatttagggttagatagcaatattgatagagattatatagcatatgtgataactcgacgatttacataaacaagattacagtatcataagatgtatgcactaatcccgagaacgtaagctgccatgacaagttttacctcttgctggagatcgaacccgatgcagcccaactcgaaagcaagaactcatcgaaaacaatgaaagtagaaaaggtggcgatccgccgaaagtgttattgaactgtcgttaaattgtttacaaggtcttgggtcatatttatacctaaaatacataatatgtccttgccggacacgactctatctctattataacttaaaatacaaataagtcccttaggtggactcttgccaaacatatctctaagaaaactaccagaatatcctaattaatagatacaattgccttcttagaactcaatccatacgtggcaatacttgtgcagcacatcaatcgatcccgtagatgattctagaaccaccttactaagatcggctacatcggctgttcttcatccgatccaatgtcagccgatgcagacattagccgatgctcctgtagccgatatgcactccgtttctaggaaacgatctctcaccaaatccgcttcgactttagcttcgaatctgatgtataatttaccgaatttggtcgtcaacaaggaccaaggaccaaggtccaaggatgcagcagcggcatatgtaggatggattttgtctggtcaggcgggcggccgtgaagtggcgagactcgagagaaggatgcggcggtcgaaagggaggcgtccagttagcggtgacacgatccaggcaacaaggtaaccttgcctcgaccgcgtccacacccctccgcgcgccggtcgcaatccgtcatgatcacgttgtccccggtgtcctctctctcctacatcatctccgtctcccctccctctcatgcaaccatggtggtggcgagttcttcaagcacggcagcacacaagaactatatgattcaccattatcatcttgtccaagattcatgcttcatgcaggacacggagggagtggaggaagaggtcagaggaggtagtctgttcggcacgaaaatctcaggaagtgcgggcacggagcatggtccctggcgaatccaagtcctttgaggccttaagcagtaacgaaatccatgtactgctataattgcaactattgtttctatattgcagtgtgcaacgcagtgctgtttgtgtatgcacataacaagaatgaaattaaggttggatacaaacaaagtgtggaacctctttcgttctaagctggcatctgctgaaggaaattgtggcctccttttttctgattccttttctattttgtgctctttttttcatgtaggggagcagctctggtgcgacagggaagttggcagcacatacgcatttcattgagcacatcttgagcgttctagatttcttgaatgttttatattgtgatcagaccaataaggtattcaactggcatacagttttctcatttgggctcaagtgattggattggtttcttgtatcttgcaatttgttgtgttaaaaaaatattatagttttattgctaaaagcaatctatcttttctgtcatccagatgaaaacagttacttgtggtatctgtaggcataattatggaagaactggattagcatggataataaatggactacattaattggcgatggtttttggtttagttgagttttctatgcacggtatcttctggtaactatgattgaccttttacattttaaattaagtgaaatgaatcattagggctgctatggacacttgagtacatttgaatgaactagcaaaaagcctgtgctttgaaagttgctgctatggacatccagtgtttattcactcaaatcttgcggacacacgagagtccaatttttcatatatttatttttcttttttttctcgatgtacaaaaattacaattttaataagtaatggggattgaatttgtgtaacccaagaattctccgaaatggcacactgcttgatgagatccacattgtctgaaacttgttttgcgtgatactcagtatgctaatatgaatactaggttttgatagtgtcttggcttaactatttgtttgggtaaatctaaaaccactaaaatatagtaattttgctttgttgatccgtctagggaaataaatgagataggacattacaatgatgccagatacgtatcattgccagaggctatgtataggattcttggtttcccacagttcgatatttattcagctattttgcagctccaatttcatcttcctaacatacattatgtcacgtatgataaggatggtaaaatcgaggatgtttgcaatcgttcatcttcttatatggcattaaacaatctcgatgatggtttaaatttaaatttgttggatgggtagtatgaactgtctatatgccctatccttttgttacatattggaaaaaaaagctatgtgtagagatcagatggacttttcctgtgcgaaactctggattacgattcatgtcaggcatgttttttcaaggataatatcacacatctcttttattttttgccttgtgtttgataaatagtttattttagtatttgtttgtattcatattaaaatggatattccattttaatttcttttatgtatgactcttctaaccaataaatttatttgtctaatgcaaggtagctaactattcaaatttcttagtaccttgtcgggttgtatgatacatctctttatgcgtgtcttgaaaattactttatattatttttatttattttataaataaatgcatttgtaggatattgatgagctaaggcaacaatttttgctacatctactaatgtaccaacaaaatgagtgcaaaagcaacatttctagcgatacatgagaatttcttaaatgtatcctaaatgctaaacattagggtagttatttatctatagggtatattctgtatatgtatcaaatgctttatttttgtacttgtttatacccgtaactaattaatggaatagctctatacttttaacatttttttagaactttaacatatttttaaacgtatatctccctcgtatattgtatattgaagtgattatatgttactaattcttgtcaagatttattctgcccacacaatatcatattattgtaatttgcatgaaatatatttgatatacaacatgaaatgaattaaagctcaattgcacagatcatataaaagtattttttgctaacatgaaattttaaaatttattaaagataaatagaatgcacagtagtgtttagcacgggcatattactagttggtcatagagtgtataaaaacatagtaggaaattgtatatattactggtttaatattaatttcaaacatatggacgcacttttcaaaaaagtttaataagaggttgtgataaagtgtaggaaattacaaacatatgaattacatatattgctggtttaatatgaatttcaaacatatggacgcacagtaggaaattacatatattgctggtttaatatgaatttcaaacatatggatgtacttttttaaaaaatataatcagcttaggagagaaaaagaaaaaattggagaggataagcagcagaaaatgaaggggcaatcagagtcgaactcccaacctatcggccacaagtttcattggctagagaagtttgatggttgtgccatgatgtgctgatacacaatgtgactattcagtggtcagtgaggccacgtccatggtaacaaattggagttgttacacgcacggacgaaaattaatggaaccgatcgctcatgtggataaagtggatgatggacggaattttttaaggaagccttgcatattttttaattaggtatagatgtgtttgaaacctcatatttaacatttccaatcagtatcgaagtaattgatattgtttttgaaatcccttttgccaactactcctaagagctagtacgaagttaaaagtggcctacaccattgtcaaagccataccctctatcctaggagtcatgagatatacggatacggtatatcctcaagtatacggaaagaatttaagttaagaaaatcggtaagttcttatggaaatactcttaaaagagcagggaatatcatagtactactcggaggggataagggttctacttgtagaccaaggtgatctgcgatataaatatatacccccaggaggtaggcaacgaatcttagtgcaagacacgccaccacagaagcaatccggaggacttgaagccaatttgtcgatagatctcgtcaaggttctctcgacaaggatctcgtcggtaatatcaaagttccattgttctcatttgtaccctatggtttcttctatattcccatataaactggattagagctattaccatacgaggggcctgagctagtataattcttgtctttttgtgtacttgatgttgtatcgttgttgacggctgttaaataccaaatttacgtcgtcaatatctgcataaatctgaaagtataaaaacatccaacatagtgatagggtttatttctaacattttccacgagttgtcatggttatggataccacatacctaatagtagttgactaaatctcggcaggatccaccacataccatgtcttatacgaaaattggcctcgagggagttccggataaggaaagacaaccagagttctacatggaaacgacaaggactactcggattgtatccatattggtttccctagttctacttggacaaggggacacctatgggtataaatacaagaccccctaggaggagaggggaaaggaccatggaaaacacccatgacaatcaacacacgcccaccagaagccacaacatacaagcctacatacgccaagacacgccgccggatatcgacttcagggataggcatggctattcccctacggtgtctccggatactgtcaggagatacgaaagcgctatctctgatctcgccgggcacggatccgaggaggaagactaccctgttgtcgactacgagtcaaaccttcagaccgacatgtcgacaacagttagataggctacccacatattgtattggtgtgattatggtgaataagagcaataccggcttcggccaataggatgtagggttattacctgacaactcaggggcccgaacctatataaaaatccttgtctccatctcttttacctcagtctcgcgtatatcctagcaccaacgatccctatactatccaaataccgtagtcgtgacatcaaacgtcgacacgagtgttggtgtatatttggatgcaggtgacaaactacccaggttgagaagaaatatacatcaaggagggaaagaattacatttatatccaagcctatggagtgttgggcccataaacctaacgaaatacctgtaattgggcccaatcaccatgccattggattaagggccctcctaccatgatcctggagaaaattcggtgccaaatgggccagcaaaggtttggtcgaacccattcggccccctttttcacaagcagttactatcgatctcctaatgatggttgtgatagtttatagcgctccaaccgccatcaggaggatagatggcaagaagagagtgaagatgcccttagaattctatggatgatcacactcccaaggcacctccacctataaataccccctcacctccttcattccaacacacaccaagcatgagctgaattacaagaggctctattgtatcttttatgtacattagaattgggagagaataagggagaaagagttggagaaattctagagttgttggtactttcctctttacttttgtaccttgtcaattactcttctttaattcataatatctttattgagtaattgagatttactttgtgatgattatctcttagttagttcctattatcgagtaaatgaacctataaatagtgtttactttaatgtttcattggcattaaagtagtattaaatagtctagacgtggtgtctatactagagtacctgcatttgttgtgtatcccacagttcgttagagtagaggtagtggcagccctcgagatcactgtagtcctccctgtccgggtacggagtagagcgctgttaacagtgaaatttggtaaaccccgaagtcatcatcggcctagagtcagtatcggtttcagagtcctggaatcagctgatggaattatcaagtcgccaatagtcggattcttactatattcggttaagaaaattaatctactaatgaaagtttatctagaagacatcgagttcaaggaggatgcggcatgacagtttatgtattaattaggaatagtttgttagtttccttttatctttaggaaagtgtgtttagtgcccgataaggactttatgttttccttttatctttaggaaagattctttcttgtccaacaatgactagtatctacccatgggtataaatatgtacacccggggtcattctaaattatctcaacgatcaatacaactactcttggcgcatcgccaccgtctttaccgagggtgcatcggctttcgatcttcagctaaggggtaagtcttatgttccgtcagtcttggccatcgtattggctacattggcgtcgttcaaggctacatcagtacattcgacctcttggattgctctggttcagttgatatatttgcctatttatttatcatatatcttagttaatctagttgagcatcttaatttgatcatattggctgagatttgttttagggtttatgctggtatcgactaaattatcttgctagattagattaactaaggtatctaccactcttaaaatcagtcaagggcttgattgtctagatattacgtttcttttcatacttagtgctgcatcagttaagtttgatatactaaatcgtgtttcgaactataatctctagcctgctttttgattgcccataagggtttcatcggggtttcagccaatgagttatatggatgttggatcggtttacaaggattagatacatgttggttttagccgattgcaacaaaggtttcactgtttatctaatcttgttaatttaatgacatcggaccttgttggtatttcttaacgatattactagaaatataattcccagcaatggcgcagaaatactcctggtatatattggttacagagttcatccgcaagcgcacggatataccattgtagcgtttcacccgagagtatttcaaagatatcgtatttgtttaatcctgtgggaagattatagtagagagaaccgtactaataatttatatattacttgtaataaccatagtctaagcatgggttagtataattcatagggtagaatgacacacaagcataagactactcattctcacatttaatctatctaagctaagtgggaagaaaatagaaaagaatctattcctatacttctagtatgcatattatacatacatcttagctataagattaactagctaataccctctttccgatgccctcctggtacttcgagaagccatccctgattgtcgagttcctcactacaacccatcatgaccatacaaccggggcttaatacagaggagtaccctcctcaggaaattaacttaggactgtatacacgcacggaggaataaccgtactgagctgtcactatcagcggtccacctctcttctgcagcatataaccccaaataatgatacccaataatctagacaccacgcctaaactaccagatactactctaatatcatcgtcatgacatagagtaattgcataagcaaacactatacacgtaccattgcatctctcagataagctagcagtataatcaatataactcagatataaagtaaagttggcattgatatacttggaaagtatgtattacaatagcagaattgtataaaaaagaatattctaaataaagtacaagtcttacaaaagaagaaaggagagctactagagccatacccaaactcttccaaagacttccggactccggtttctattctattcctactacattatcttgagaatactaaattaagtttgagagaatatgagaaaactttgcttgaagtgtgtgttgaaatggagagagtgaggggtttatatagcctcccaatgacggatgtgacggttggaatggtcggaaataccctccaaccgtcattgggggctaatccacaccgtccagccgcaactctacatccaacggcgccaggatgggtttggccagacccttggttcggccgaaccatgggctgggccaaaccagcccaatttcgactggcggcctcccctcttgatatattttgtagacttgtgaattttggcccagttggtcgtgtcatttctaagttcttggcccatcgttccacaagtatgattctcgacatcgtccgattcattgatctcttgttttgatgtcgattctcctccattttatgttcattctctacaagaggttagtaatcctagtactagtggaatatttattattctaacacaaatatgcattgcaagcataactagttctcctttattttggtagtattgatggtcgaagctgattgctaacgaccgtcaacaaaacccccaagcttgaacctttgctcatcctgagtgaaggacaaaaggaaacaaagatttggttgttgatcaggagttgctactatgcagtatatctcaaatgtataggtgcaaggtatatgtactctctctcaaattaaataattctatggcacggtggcttacccttacccctgattcccacgagacactgtctcaccttgtcttgagtggttgaaagacaaaacagcaattagagcactaatcacccaatctttattcaacttttattccggaagtttttcaaaggattttgcaaaagaaatccaagttcctcaaatgattcactcggtctctccaagtgtatcaatattatttcctcactatttatgcctctttgattcctactctaaggttgatatgtggagctcggtagggatcaaacatggcatacttgtattcacatttattactaagtcaaaaactcaaacgaaaatagataactaaacatactcaagatcaagatcgtccaaagtgtgtgtgtgataaatggtggaaatgaaatgtgagaaataaagaaaacgcttctcctttgtgcttacttccttctcccaaaatccttttcttataaataaggagagggcatggctacattattttctcttttttttccaacgtcatgctcatgcttgaaagagcataactttattattttcataaccttgcctttccctccttcttttctttctctcttttttttcaaaaaggatttctttttaggagaagaaagcacataaaagcatggagaatttatttttggtggtagtatggaaatggaatggataattgctagcttctagtgtaggagtttagcatctgcatatatgtgggtgtatgatcttgatcatagagcatgagaagtatctacacaagtcacaaagatttgacaaaattcaatggaattgcaagtaaccaaaatgtatatggtttaatcaatatggaatatttttggctctggtaagaatttatatcaaatgaggaacttcataagtttatcattttgaaaaataaaacatccggaattcaagtcaaacttagacaaggactatagcaactcttatttactatctcatatcttgcaacaacttagactcagattagcaaatgcagctcatttaccttaggttcccagataattgttggctactcatatttaatttttgagagtacttacctatgaactcatatatgagaaatataaaacagagcaactatttatcatttcaacaaagagaaccaatttgtcttacctagcataataaaatttaacctatctttttggtattttctattttgcaaatttttatgttgttttcaggtttatagaatgcaattggaaaaacaaacatgcaatcggaaagggaaatatgcaatgtgatataagttaccttagtgggcggatagacatctccctccaagcttggctttcgctcagggttcttaataaggattgaatccctagaagcggaagtacgcttaaaggccatcatgctgttgctgcatgaggctgttcatgttggtgaactgagcatcagcattttgttgccattcttgcatttgcgctatgtgttcctcgaggttgtgttgggtctctcccgtctgcatatcaagggtatccattctcctggtgatttcacccaagtcccaacgagaggaactcgtgcgccattcaccgggagatggaggcataccacttgatctgggggactgattgttccagccttcccactgtatgtcatgaggcgcccgccaccggctctcactggcactttcccagctcgagatcccaatgttgtggtgtggagcttgggtgcatccccagttggctcccaacctgcctcatacatctgtacgggtgttgaggatgttgaacctttccgttcattccttgccatgttgcgtgtctccctgtatgttccacctacacgagattcttctatggtctgcaggggtatggttagttcatgatagttgtacaaatgataccccgcgttaggcaacggaatttcatttgtacaaccagggaaaaagtatatcaaagacccatctactccatgtttaaggatatgcccttgcactagataactctcatcaacacagggacgagcggttgaaatataagcaatttgatcattggtaataacccctagtccctttgctatgcgagtaatcagagaagtgcataacaggagcagtaaatcttatactttctaaccattgccttatcatacattttataggagcaattttaatcttcctaaccatggcaaacatgataatcagttcatcctctctaatatgtctaagatcacctataggaaacaaagtcatagcaatccatttgtgaataggcctaattgtaggattatggatatcattcatcctaatttcttgcaaattgaagcaccagaaatgtcttcccaaaatctgtttttctcaaacccggaaattccttcccgaagatcgattttataggaatcgtgaaaaccaagaagtgtacttaatcctttccatgaaagtgtgtattcattatggaaaaagcgaaaggaaattccatcttctatttctttcgaagtgcacagaaattgcaaagtaagcaaacgagaaccaggctcatctactacagtaaatctctgccatccaacagctttccaaatagcacgaaagttagtatccatacctatctttttagcagcgccggagagtatacccacgtgtgggcatactcccggtccttcagcatgtagtaggtttgtctttcccgatcaccgacaaggtcgaggtcggtgtcgctcaagagatgttgtggaatgtcagcatcctccatcgagacgtctacggatgaacgagcactagactcatcatgatgacttgatggagagccggatcccttcttgaacagactagacagttgcctcctcatcctgcacaaaggaacaagaacaaactaactcgacgggggttagaataacaaaagtttcacccgccggttagcttcatcaaagcaacttgtttatgcaactaaatgcttgaatttgagggaaactaacaaagcttgaatgaattttgagagcaaatcatggagagggagtgaaaatgagttgaaatgggggtggatttccttctcccggccggttggcttaaatagaatgcccacaacggtcataaccgacctgtgggacccactagccgttgcctcaaagaaagaggcacgcaaccgttggccttgctggaggccaaacccttggtgggcccaaccaaccccacattcggccgttggattccaacggtcagtgcggtcatggctcagcgaattttcgttgaaaattttattttggtttgctctggaaaattcatttgaagtaattttctcaaaattcaattctaaatgcaaattttggaattcacatatgcattgatgcaaaaatgcaaattgatggaaataaatatgtggatacataccaatttacctgttggcgaaggtcacgtcattttcggtccaacgtgcaagaccatacctcccttcagtttagttcgcggagtttccacccatctccggaggtgatggagcgggcgtcttttgctttaccttccacaccttctttggttttggtgcgggcgatggcttcctctgagctggcttctcttgtttcttggctgttctgtgggtttggcccgtatttgatccggaccatggaacattgttcggtcctcggctaaaactcaaatttttcttccttcccgttgatacggaaacggatgcttcctgttcctacatcaatgttggcatccgcggtgctaaggaatggactccccaaaatgagcggcgtctcctttttagtgtccatgtcgagcaccacgaagtcgaccgggataaagaaatcccgaatcttgatcggtacatcttccgctatcccagctaggtagcggaccgatgagtcggtcaactgcaggtgcatcggtgttggtgccaacaccatgaagttgagcttgtcgaagacgtctttgggcatgacgcttacacttgctcctaactcgtagaggacttggtcgaatttatgtgtcctaatcgagcagatgatcgtgggacaccccggatccttcttcttttccgggagcttgtggagtatgacattgttgcactgctctgtcagcttgaccacttcagttgttgggagcggccttttgttgttgagtatatccttgagataacgtgcgtatgttggcacttgcatggcatccaacaacggcacgttaatgtggatcttctgaatcacctcaagaaaatgagcgaactactcatctactgccggtttcctgcttctctgagggaatggcagcagtcgtgtgtcacaatactcctggggcacggtcttttctggctgaacttcttcatcagtcgtgcttccagatggtgcttcttgggtgatactgctggtttctacagggttaggatatggcggatcacgagtggacttcttcatgggtttctgggcagtcattcccagagtggtccatgctgtcgcagacctcacacgtgacgtgtgagtccaaggccttgatggtgccttttggccttttctcgtgatcgtccaagagtttcatgaggaggtccagtttggcagcaagcatctccggctccttgacggtgtgcatgcctcgatgacaggtctgaagtcattcctcgctctagcccatattggagaccattttctctatcaagtcgacgcctcctcgaaccgtcttagagaaaaaggctcctccagctgccgcgttcaggtggtcgcgagacgtgggagtgagtccattatagaagttttgcaggatcagctagtcatccatcccatgatgaggacagacggccatgtattcctgaagtcgttcccacgcctcaggaatggactcgtcccttgtctgctggaaacttgaaattctcccacgaagggtgttggttttgcctatcgggaagaactttgacaggaatgccattgagcatttgtcccaggtgttgatcgtggcacggttggcataaaaccactgtttcgctttcccaaggaggaaaacggaaacagtcgcagcctgatggtgtcaggactgacccccttcattgtgtgcatgctgcagatctccaggaactgttgcagatgtgtgttggcatcctccttaggcttgccacagaacgggctagcctgcgccatcgtgataaggctggacttcagatcgaaattcacgtctgccatgttgatttgcgacccagtggccacattgtcagcagagggagcagcgaattcacagagggtcttgtcagccatagtcttgaaagttcgtggcactggtatggctggtttctgtgtcggaagagttttctgcggagcgacgactcgcgacttgacgctctgaaagaaagcctctggattttccttgaagtttttcggcaagttaaaaccaatcatgcactaccctgtttccacaataaaagtgaaaaaaaccaaggttagcctgcaaaggacaatgattatacagaggtaaatatagagtaatagtagtggtaatctcttttataaatcttcccggcaacggtgccagaaatgtttattggtatttcttaacgacattactagaaatataattcccagcaatggcgcagaaatactcctggtatattatggttacagagttcatccgcaagcacacggatataccattgtaccatttcacccgagagtattccaaggatatcgtatttgtttaatctcgtgggaagattatagtagagagaatcgtactaataatttatatattacttgtaataaccatagtctaagcaatggttagtacaattcatagggtagaatgaaagacaagcataagactactcattctcatatttaaactatctaagctaagtgggaagaaaatagaaaagaatctattcctatacttatagaatacatattatgcatacatctttgctataagattaactagctaataccctctttccgatgccctcctggtacttcgagaagccacccctgactgtccagttccttacgacagcccgtcatgaccatacaaccggggctaaatacggaggaataccctccccaggaaattaacttaggactatatacaagcgcggaggaatacccgtactgagctgtcaccatcagtggcccacctctcttccgcagcatataacacaaaataatgatacccaataatctagacaccacgcctaaactactagatactactctaatgtcatcgtcataacatagagtaattgcataagcaaacactatacccgtaccattgcatctcccaaataagctagcagtaaaatcaatataagtcagatataaagtaaagttggcgctcatatacttggaaagtattacaatactagaattgtataaagaagaatattctaaataaagtacaagtcttacaaaagaagaaaggagagctgctagagccatacccgaactcttccgaagacttctagactctgttttctattctattcctactccacaagcttgagaatactaaactaagcttgagagaatatgagagaactttgcttgaagtgtgtgttgaaatggagagagtgagaggtttatatagcctcccaatgatggttgtgacggttggaatggtcggaaataccctccaaccgtcattgggggctaatccacaccatccagctgcaaccttgcatccaatggcaccatgatgggttcggccgaaccataggctgggccaaaccagcccaatttcggttggcggcctcccctcttgatatattttgtagacttgtgaattttggccgagttggtcgtgtcatttctgagttcttggcccatctttccacaagtttgattctcgacatcgcccgattcattaatcgcttgttttgatgttgattctcctctattttatgttcattctctacaagaggttagtaatcctagtactagtggaacatttattgttctaacacaaatatgcattgaaagcataactagttctcctctattttggtagtattgacggtcaaaactgattgctaacgaccgtcaacagacctccagccgatgtatgctttaacctttggatccgtgcttattctatcgtatcattattagccgattggtttctattagattatattgttgttatattacattatcatcagccgattgactttatttacatcaagtgtcagattctgcatcaaacatatagccgacagctcaaaaccctatcgctatcggctagtattggcatcgactggaattattccatcgacttgtcagtcaatcggctcattgatctgctatttgtatatcttgtcagttgtaggatcaaactgactggcatgcctgcatctcatcaacctttggacctgcactagagctaagtagatctcccaggcagttgtgttcttcaacttagttcgcgccaacatagttttggcaccatctgccgagcgcggatttctcgtcaacaagcgtgttctggtagcaacgagcaaatcagtgcatgaagtattgcggtagaattaaattaagctttctgtagacactgtttctcactaggaaatctattagggttacggataaggcataccttctaccctacgatttaccaaatataccggattggcatacctcgtatcatacgatatgtttccgtatgcgataaggaaatatacaagatattatggaaaatatcctcacaggctagagattatcagagtcctactcggagaggatagggactattctctatcgtgcagggttcgttgtctttgagttctacttagagactaaggcaactcatggtataaaaggcacaccttcgaatgggctgaggatcatcgaatcatagcaccaacacacccatcatagtttacaaagccgaatgacttaagccgaagccaccggggtatctcgtcgaacaatctcgacaaggatctcgccggtaccatcggattcatccgttccctttgtattatgtggttttccatataaatctcatataaactggattagggctactacctcacgaggggcctgaaccagtataatccttgtctcttttctactttgattttgtatcgtgtagattctcgtaccaacgtaccccaatacccaattcatccggtctacgggtaccccccgtcgatagtggcgcgccaggtagggggctttggtgatcaaggttctgccgacatgacttcaagccgctccaacaactttgtctacatcggccccattgcaggagatccaacctcaattccgctaatgtggactcaactcggatccatcgactttccggtttactctgcgataccgatctcgtctggcccaatctctgtcgggaacaagaacgtcgtagctacgacttcgagaaatgacatgtcatcggtgcctccctccatccatacggaaaaaacagacaacgactatgacaacgtcaacctcaagcggccaatccccatcccctcatcgggaaccaggcgccgacaaggatgttctctcagaaatcatctgcctggtgtgttatccataaaacacccaagcactttctatcagactacccagtggcacaacatgtgaaggatgaactcagatcttataaagaacgaggaatccaacgaacttcaccgacaaataccacttggtgtccgatccacaaatggaaaatgcatgatctctcaagctgcagagtttttctcaacgctaccaaatcttcctgccctcaactccaacaaccacgagttcaatctcggcgtgttgcaaaggaacaagacgcagacaaaaacccagatcgtttggtaggatttgtaggtttggatcctcacgaaccctcggtcctgcacggtcgggatgatcgagaatcaaactctccacgtgacatgaacatgatcaacgggagggcggcggtgaaccatctgctcgagcaaacgcggatcacacccgcactcctgcccaacatctgaacatcgttaactcgatcctaagagaaagccctttcgatacggtcttgcatcccaacggtgatcaatgggttcagcgactttgggagacaatggccaacctgaacagtgcttttgcgacagttgccaaaccaccagccccagacttgccgcatcaaggagatgatgtacatgacggagccgacaccgaagtcagtcaagaccatagcaatcacccaagtcgagatctaggtcgaaatccccgcaatgcttcacctcgtgtccctcgtcatcaaaccccaccgccacaaggtaatcacgatttacgcgatcacttagttgggcgtcagcgggaacaacgagttgacaacaatgctcaccaacgccatcctccgccgcgatgaaacaacgttgcgaatcaaggaggccaccctaacaagaaccaagaccgataggattgtcgaagtcatcatgatgatgaccgtcgagaacggcgagatcgggacgacaatggtcgaggtcaacgacgagataacgatgatcgacgatggcaggagtcgaattctccagcctcccgtcgatatcatcaacaaggacgccgatccaggtgcaacgctccatatccgagcggcccttcgtcatcatcatcttcatcgtcctcatcatcagctagaccacctagaagacagcatggacaccgaccgcgtatcgtaccgggaggaggatgcagagcattcacacccacagtacgagaagtacggtggcctgagaaattccgaccaggagcaatagagaagtatgatggaagcatagacctcaaggagttccttcatgtctattctacagttctctatgctgctggggcagacgacaacgcactggcaaattacttaccaactgcgttaaaaggatcagcccgatcatggctggttcatcttcctcctcgctcgatttcttcatgggaagacttgtggcagcagttcgtcgctaacttccagggaacgtacaaacgccatgcaatcgaggacgacctacttgccttaactcagaaccccggtgaatccttgagggactatatttggcgcttcaacgaatgccgaaatacgatcctcgaaatcatcgatgcttctgtgatacgtgcgttcaaatcaggcgtccgaggttgctacactacctaggagctggcgacatgatgaatcacctctgcacgcaagttattcgagatcgttgataggtgcgctcacacagatgatgccttaagacgaaaagataaagggaagacaggcgaggagaagaaaacaatgaacaaagaagcgccagagtctagcaaaaagagaagccgtaagagcgggaagcgcaaggcaacaaaagaggttctagaacatatacctaattaagatggacttcatcagctaattaaaagaaatataataaagtatacggcacctttgtctaatcctgatcttaattgttacttatcaatttaattagtagacctgcttcctcataacataaacaagatacagatcattcaagtcggcagctccacgtgcatagagccaacctgaattaattaacttattcttcttcttgaccacaatatcagcagcatcaaaatatgtttgctgacaccatggaaaaacaccagcagctagcccttttgatccctcgctcttgccatttttcatgactgaagtacaggaaccaacctaatattcattaaactgtcggttgtaatatttgtgtccctgcatgcgaatcagctataggtgaaatatttagggtagacatggtctcatcacacaaattgtacaaaataattgatgacacacagaattccaagccttcctattccaaaaggaaggaagaggttcccattgaagaaaacgtaccgactagcagggtacgaatttgtaacgtcccgcctcttctaggccgggcccttcctgaccggtcacccatccctaaattactccaagccaagcatgcttaactttagagttctttagaaatcggctttcgaaaaagaagttgcaacttgttatatgagtattctaataattctattaagccttagatcggaatgttacataattgccccttgataatacaacaaacatgtgactagaacaatgcctaagcctaacctataagtaaaggatactttaatttccagtacagctagagcaaaatatggacaccgttagcaaagcagcccccatccacaaaagattttcttaaagaaattatttccggactattaacacattcaaaactatgcaaaattagaatattcacatacctctctcagagagagagatagttaagaccagggttcacgattccgacgaaaaccgatcgaattccacgaaatttcgaggtttcgacgaggctgcagaagccggatttcgatgagtttcatccaaatttaaatttgaattgataaaaaagaaaaaaattaaataaaatcttataaatagtatgatattcatcaaacctattgggatataattttttttaataaattgatgtattccatatatttactaaaatttatagtaggaaagaaaagaataaagaattaaaaaaggaaaaaaaaattagtttacctctttttctagttaccaattgaaattttgatgatttcgctcagaatttcgccaaagccgaccggttttcgcgagcttaggtaaactcagggaatttgtattcaaaatttggtttatgaaatttgttcgaaatctaccggcattccaccgaatttcgcgaaaaccattgttccgccagagcccgaaacataaggccatctcggaatcgtaaaccctggttaagataaacgggataaatgggaacttaccgcgcagtggtggatggcatctgggtcaccaccggagtcgacagcgatgcgttccagctccaggactggcgccagtgtccacatcattatcccgtccaccttagcctcccgcgctgtagccttccacaagaacctttggttgcggcggccattgggagtgggaggaccgtgtgttgggactgaaccaaaacacctagaatgtgcaaagtacaattcactaaccggcaaacatatttcacacaatcaacccatcatcttgccatgaactttgaggatagtttcaactagcaaatcaacaatgcaataacaataaacacatacacacaagatatggtgatttacgtggaaaaacctcctcgatgtgaggagtaaaaaactacgggaccaacggtccactccaagcttccactataatcaacaatgggtacaattggagtcttctctagaacatctagaggcacatctcaatagcaactacaacatcaagttacacacttggcatcatcaacatcaaccatcaaagctaacaagaggtatatcaacaaacaagcagagaaatggcagattttgtcctcttcggttctcagctgagatctctcaaaccacagatgcaaattgatgaaacatggcagaaatgatggtctatgagtcccttccaagctatccaaaaaacagcttaatcggacaccgtttgacccctcaaactgacactttactaattgttgcacaatctgtaatttcagtaactcgagttgataaaccactactcaaatccggtgctctactcaaacatttctcatccaaactggccagattaaagtgctcaaagtgaggaacaaactcaccaagtttggtgccaatccaaccacgtttgagcctctaatcgctgacttgataaagatcgggtaagagccccgagctgaacaagctggacttcttcctctccctctcttgtgtttgttggttatttcttcgatcaaaggctactgctctctctccctccaatggaggctagggtttttcttcctaccacaaggataaggcaatatcaaccattgatcaaggcatgaatcaatggctcacaattattaggcatttttactgcaatgggctgagaacaaaaggtacatgtggagtgaatttagcccaacaccgtggagaggaatcagagggaggagcacaggcggttacgttgcccggagcggtgagcacggaccacggagaggttggagtggcgcggtgcggtggcccgtgaagagtatcctctgccttcacaccgtgaaggcaccagcatgcagtcaagtaatatcaaccgtccaagccaatccaacggctcatcaaggactgtgtaccatttaactcacgctcaactacatttttacttcaatggttatatgggttttgtttctttgacaaaattttgttggtgcagtaatcaagggccgtgctatcacaaaaaacgccgaggtacaaaataccattgctttcaataagcaaaaggcaaaagtacggcgtcaaagctatttttcgcacaaatttttatatgagacccaaatctggttgaatacttaggccattcccaacctaaaacactatacataatttccataaactccacatcatcaagaaactagtactaaacactactcttccaatgcaaacaccactgttccatacttaaatttaatactacttatctcacatgatatcttagatgttgtgtagaaaccatgtctcatgtaaaacatggtttccttctcttttctcatttattcacttgtcatatcattttttcattctaggtggcagcttatttaatgctatggacaccatcctagtcattgggttggaaatgaccttaggctgcgttcgggaggaggggttgtgataccctcctccccggcacgcaaaatggaacatgtattattacatgattaattaagtattagctaatttttttaaaaaaaatggattaatttgattattttaagcaactttcgtatagaaactttttgcaaaaaatgcaccgtttagcagtttgaaaagcgtacgtgcggaaaacaaggatgaggggctaggaacttgaaggaaagaacagagcttaggagaacccatcacatgacatcgcatcctagcggctagcggcttcccaccgacgagttagtgattatggttatatcgattatgagaggcttggcagattgctaattttattgatgctaacgcgatttgaaacaattgcgaacgatccaaattccaaaacaatggcacaaagcattactggctaatggctatagcagtatatacagatacattataccctgacatatccaggaccaaccattcaccgtactgatcaaaatctgatgcacagaatcatcagaaccaatggcccacaaaacaattaattatcctccacaagactaagggtaaaagggatggaaggactcctgtcctgtgatgagattatattctgcagtttattttccaagcagacggcgtgcccgagtgtttgctcccttgatcctgaagttcagttcgtcgtagtccttctctgaatctcccaaagcctttgtttgtctgaatccaatcaacagacaaaaagacatatcacatgatgatttttattggttggactgttaaagcaacaatactcatcagatttaaatataattatgcaaagtgttccagattagatattaggaagtaatttgccgcttgaatttgaaggtactttggccaaactttttactcctttttagttcgttcagcatgaagaagtgaaaatttttaaagaatggactaaacataaactggcagttagtacaaactataaaagtacgctggaattagagcacaaaaaagggattccacataacaatacgccaatctcagaaaaaacaagtgtgtattagtttttatgaactaaagtgaaaaatgtggcattcacctgtcaatctcagtgcccatgtcaaccgccatgcctttcagctcggtcaatatgttacttagatcagataggccatcatcctgctttgccttctccatctgagcaacacaacaagataatcagaatacacacacttagcaaatcaatcaccatatatgtcttagcgcattacctccactttctggagggctgaagttggctcggaatggaattggcgtgcattcgattgaggtgggtgatccgatagtcccagtttgtgcctttgttccaaatggctgcccttccgaatgaaggaatcatctgcatacaagtaattccatccttccagttagttacacagagaacataactgataagtgataccacatagtacaagctttccctgtcagcaactgttgttgcagtctactatttcaagactagagttggagattacctctagttagcataggccccctgatttctccattcttttttggcttccactttttggaaaatatacccccaagatcacccagcagcttctcgctctgaaaaggtgcgaagaattccctttagccattattaccacataatacagtaaatttggagttggcaattaatttctgaagtgtgacacgaagtttgtttcagttttcgtggacttattaaggatggaattctgaaggaaacaggccaattttggtggggacttgttacgccactatgtgatcaaacagaattaatcaggcttctgagtaatcacatagtattagttattagtttgtgttagttaccctggagagatcctggtcgatgtcgagggtcatcatgtgcgtgcgcgtgatctgctggccctgctggtgtatggtgacgaggctcttggacgcggtatccctcatctcctcggcgatgcggacgcagccctgcacccgctgagtggtctcctccgccttgtacgccgcgtagccctccagctcctgcaccgactgggcctccacgccgccggtgtcgcggaagtcgttcctgtaccggctcctcgccgccgccgacgaggcggagaagccatccccgccgccgaagagggagccccgctggtcggccggaggaggcacggaggaggccctcgccggtctctgctccctcccgccatcgtcggagtcggagtcgaaggggttgctgctccgcgacggcttcttggatgcgaagaacgatctcctcccgctcatctcgaaaactccttgggtcagattccgcagcaagcaagtttctgcgcacaaatgaaactgaattgggcaaagatcatcccccgtgccaacttgccaagaatacacacaccaaatcccgattccttataaattccagtaaccaagatcgaccttaactatcaagaaggtccagaaataactgcgcgtacctctgcggacagatcggaagaattagtagtaggcaagaagaacaaggaagagcagcacatagcaagaggatatataacagtagaaagcaagggcggatggtaaaagcgaggacttggtcgcgcgaaggcagaaccgcaatcgcgtgcgttgcctctggaccgctgaccctgtcctcctgctcctcctactcccttcctggcttcttcggcggtagagtgcggggcggggagccagggacacgcgcttctagttggaaacaggaaaaaccgtcgagattaagaaagaatataaattggcgacagcgatggggatggtggctttacgcgcagggactgctacatctctatgtgaaggcagcgaaatcttaactactccatccgttttatacgtaagactttctaacactacttaatatatccgtgctaaacgctacggtgtaattcatttaaaattttatgttagtaattttttttgttagcataaagacgtgaatataaactcaaataacaatatgaatatgatatgatatagatatcaaattaatggtttcaccatgtaaaacaagataacaattgttggtcatcttgttaacgtctacttttaagatatacatggaacaactactaaaatttgccgatggcaaaagtaaatatttagtgagacataagtgttaacacatagtcatgttatcaatccggtgcaaattgacgtatctagaacatgatggtatggagaagataatcacataatattccacctaaatagtgatgacgtgctttacaaaacaagaggaagttggtgagtaacattcggattaacaatttactatcttctaaaatatattttcgaattaattttgatcatgcgaacctacctttgctcaccagttaagaacatctttatacacgatattcttggtgctcttccctgtggggtcaacttctttctttggcttttccaaaatccttgttgttagccttgacacaccccttgacaatgcatcatatagctgaccatgtgaaaacacgggctctggaagatagatcccaacatttgggatggtttgtccttgtgatttgttaatggtcattgcgaaactaagacgtattggaaattacttccttttgaatttgaaaggaagagatatatcatcggagggagataaagggatccgtgggatgaacacccttttgctggcatgttgtccaccaacaatctcagcatcaattgcattatcttggaaagctcttaccataagtctagttccgttgcacaacccattattaggatcgaggttgcgaagaagaatcacaggacaattgatttttactatcagctcgtgtggtgggagaccatttggagtgatagagttaaggtaatccagaggatagctattgtgagggtcatcatcaacagagtcaaagctatgataaaccttggcctgcactggaaatctgtcaatcatattcgcattcagcttatccacataatcatttttagtggatagaatggcacgtgtgctcatataagatgcagagcttgcattcttttcatcatcaagcgagggaaacacatgattaatcaattaatgtactgaatcctcactatccccataagcaatcacaatttcatcaggcaagcgaacgtaatcatctctgatagtgttttcagttccatttccaattctaaggagatattccgaaaaccatggattggattgagccctcatgttacgcgacaatcgtatcttcctaatattttcccataaatacgatctctgcaatgttgcatcagttatctaggcccttgtcccacgtgtaaccacgggaagaacctgtctgaagtcaccgccaaaaacaacaaccttgcctccaaatggcaataaataacccataatgtcttgaagatacctatcaagtgtctcaacagctgacgcttcgtcattgcagcttcatcccaaataattaaggacgccatgtgaagcaattccgcggtgccactttgcttcgtgaagttgcacatgctgttgtgagcaatcttaatagggattttgaatcttgagtgtgaagtacgtcctccgggcaaaatcgacgctgctataccagacgtcgcagttgcaatagctattaatccctcggatcgcactctagcaagaagcgccttgtacataaacgttttgccagtgccacctgggccgtcgataaaaaatatctggctcttcttattagttacattatcaattatctcatcaaatcctgcacgctgctcgtcattaagggatgtgtatatgtctagatggtcttggtccactagcacgttaagttcctctataatctctgtcattacgtcgttggtacgttcacctgattagtgaaaacaaaaatatgcgtcatgaaactattgatgggtggtgcgaatgtaaattaataaaaaatatgtgccagtataacaaaaaatacctatatcactgatctcgagaagaccatactccgtgatatcgttccccatggaatgaagcaaatcacgtatatctcgtagcaccatctgctctactgctgcagggttagtgttccctcggctataatcttcagacattgtagccttgtgattgtcccataatgcacggatatcggtgacttcacaaaataccagtatggttgcaaataactgacgcagagcagatggcatttggaaagtggatgcctcatttaaacaatcatcatgtgacttgtccgtctccacaagccctctcttctcgcatgcctctctaaatgtagagtacgttgtacctgacattgtcctcaaatcttcaaacgaggtagcacctcgcacatggttgagaagaactctcaagttgtatctctccccttctccagggtgagcgtacacaacccgtccaacttgacctctctgcgttttccttttctgccacacattctgtccaattatccagcgatagtgttcggggaactccttgtatagcaatttccttgcttctgggtctacttgattcattttaaaatactccgtaagagttgtcctagaagaagatggtcgattgacaacatcctcaagattaccatcctcattatacgtgacatactgcatgttaggaagatgaagttggagctgcaaaacagctggatagataccgaacagtgggaaaccaagcatcctatatatagcctctagtggtgtcacatatctggcatttatgtactgttgtatctcatttatttccccagatggatcaaccgagaaagatgcacaatcgtgtcctttatacacatacttatataggtacttcacagatttgatgcttgcgcaagcttcaacattgatgtgacagttataccgcataagcaatcctggattatatgggaccacccacctgttgtctaactcagcacctctaatcttgacacgccatctgtcatctcgcctcctgtacaaagggtacgagtccttcccttgttgtgttgcctgattgaattgtcgaggaaagtcgaagcgacactctccatccaccatacaagcacaattcttgttcaatgtgccgcatggtccgtggagcatatgcttgatggcaagaagatgtagctcagggtatttggccttgtctggtatctccgcgcaaatcactttatcgtactcatctggggttgtcaatttactgcctgacttcatgatcaataggatgtgttcatgtggtagtcccctcttctgaaactcagtgacgtgcgcataagcctgaacctctccaaaatattttttcttcacaaatagatccagcatgtctcgcaacttagccctgaaaattcttgcgacaaggtctggtcgatcttgcggtaactggccaggttcgagattttccgttatctcatcccagtatgggttgcaggtcattgtgataaagtaatctggcctcccaaaacgctggacaagagccatcgcattgagaaaccttcgctgcatgtcgcgatcacctccaggaaaagagcgaggtagcacaaccctcttaccaaccgccgaaccacttgtctctccagaagaaagcacatcaaccacgccctgcaatcattaaataacaccatgataaaataacttgtctgttgaatcttggatgggagacaatgtcaatagttgtggaaatatgttatatcatttacctggtatagctcagcccgaatctttttttggttcgcaggttttgagtaccaatcgagtctcatagactcgattttgatgtacatgtcaacagcccattgttggaaaatttgtcctccaaacaagatgatgtttagaagtccccttctaacctatagcctaaagcaatagtactccctcgctgtgacaaacttgtcctttttccctttgccagatctgctactatcgtcattatcatcttcattgtctagataattgtcaacaatctcattctttgcatccaaacttacatattaatatacataaacaatgcagatgggcataaactttagaaattattcgacaaaaaccattagtatacgtacccggaagatcatcaaaagtgatttcttcgttagtacatacattaccaaaagtcggcacctcgcatgtttcatccatttccacatcaaacggaatctggttgggatcctcgtatggcattttcaggttccacccagtctccccattagggttaaaaaaaggatatgccaaaggatcataacaaccatggtatgctttgatataattgggcttatcacctttggcacgtaccaagacatgtctatctaaggttctcactggatcatccccctctaacctgatagtagcaacctgcgaggccgtgggggcattatatcttcgttggtcaggtgttacattggtgttgagctcaatcatgtagtcatctaaattaggcatggatccgactcttttgaaggtttgtacgtatgggttcttggccaaaatacctagaatgactcggacaaggttgatatcaaggtcaggagacctccaaaccctatgagccagtgcatcagcatcttctgtatcataaaagtaaagctgcatatggcgaggaccttgagatcctggaaccaaattttccaggcgatggtacaacgcaccgtgtacatgaaatgtatacacaccagtacccgctgcagtgctgactcgttggtcaagggtctctccaaggctcgtgaatgagaaatgagagttgaagtactgtatgtgctttctgaaatactttgcatcattatgcacctgactggtaaacaaccatattaactcgtcaggcactacaggaatcttaacatttatctttccctccctacaacagaacccaggagactcaaattgaaaccttatcgcatggctgtgtttgcaatcaggcactttttttaagagatggtgtgtcttcgacagtttatggtacacacgatcgtgtggatcatcagtaccaatcccgttaacgccactaacaccaacacgatatgactcgtatccatcgtcctccaaaacttgactggcttcatcaaaatcattgtccgcaccttgttcgtcctcaacacgacctgtggaatgatggttcattatgcatatgctcaaaattttgttagtatatataatgtattaaatgagataatgattgttgagttctcaccgtcgtcgacaccaccttcatttgcaggctcgaataatgcactatcgaattcaacgtagtcgttatctggaatggcctcatgaacatttggtatttgtgtagtatgacattgcataattccatctagttaaaaagaagaattcattacattctatgggattgtaaacaatattgggtatgcagcaacaaacaaacacaaaatatcaaacccgacaagttgtgttcacctgagaagggtgattgttggttttgctcaatgatctcggattcactcttctttttttgtcgtttatacatatcatttctatgaagccaatcgattggatcatctggatcaatattttccttatctagtacactcagtgtagcatcatcttcactaaccctctttgactcagccttcttcctctcacggtactcacgttgctttctattcctttcttctttcttttctgtgctggagattgcagatcgcccgacctcacccccttcactaagttctgtcgctgaaatagttgttgctagcactggactgtcagatgtaacattaccggtaccacttaacttggccttcttccttgcacgccattcacgttgatatttgttcctttcttctctctttcgtttatcacttgaatctgtaagctgagtttttttgaaaatcatcgccttcaatctaaattgaaggtgaaatagctgctaattgcattggatcgccagatgatacagtactgccaacaccacttaactcatcccttttccttgcacgccattcacgcatatatttgctattctggtctctcttatgttggtcagaaagttcagttgtctgcagcacacaactctcaatatgctgagaatatgcaatggttggttcctgcaatagcgttgtaaatagtccatttccatcactttgagtaagttgagttatgtggaccttattacaatcgctctgttctggtggagaaacaattgtggattgcactaaagtgctagatgttacatgctcattaacaccacctgtcccagcctttttccttgcatgccattggcgcatatatttgctcttctcttctctcttctgtctgtcactaagttcggcaagatgagttatgtgtacctcacactcaccgtgtactgacggtacatgaacatttgctgcttgtaatggagtgagtggtgttaccaccttgcttaaaccacttaactcagccttttttctggcacgccagtcacgcatatatttgctcttctcttctcgtttctgttggtcagaaagttaaaaggtagactgtcacaccctaaagttcttctctcaagcctaaattaaatttataaatggtcccaaaaaaatatcagtgtaaaagcaagagtgaaaccctaataaattaatgcaaataataatcggaattggcatgtgggatttttcttgagttcttcatgtcgaaatatgctaacaagatttttagtggaattttcagaactctagaaataattttaaccaattaaaaatgagcacaagcaatagttaattccctagaaattcatttccttctttttctttttcttttccctcctttttcttttcgaatgggccgccggcccattctcttcccctccccctccccgctgggccggccgaaggccaaggcccagcagccggccgcctcctccctcctcccttcgggtcgccgacaggtggggcccacctgttgggcccgtctcccacctccggccgcccgccgtccgcagccgccgcctcgcaactgcccgcgcccgcctttcccgcgtcacataggccacgcccgcgcgtgcgcccgcttttcccgcgcccctcaaccccctctcccgctcgcccgcaccccgagatggccgggatttgaatttcaaatcccgcctctctctctctctctctctctctctctctctctctctctctacctccacctccccacgtcagccggcgaaatcgggccgttcccggccacgtccgagcccctctcccctatttaagcatcaccgccctcccctctctctttttctccatttcgccgagctcccccgtgccctctactgccctagcgccgtcgccctcctctccgccgccgccgccgccaccaccgctccggtcgccgctagccgtcgtgccaagccgtgccgtcgatgctgtcgcgttcgccgtcgtacgggccgtcccgtccacctctcctccgtcggaatccgccaccggaacccactccgcaccgtgcaccggtgagcaccgccatggccgctgccttcggccggcgtcctcgccctcttccatcgtcctctctctctctctctctaaccccctttcatcatgttcgctaggtggttccggagaccgtccgccgttcgccgtcgtctcccggtcattcctcgtcgccgttcgccgtcgcccctccgtgccggccgaatcctccgtgagcatctccccgccgtctttccccctctccctcttagcgccgccgccttgccgctcggggccgcgccgccgtcgctcgccgtgcatcgccgctcgccgtcggtcgccgccgctctccgccgctggccgttcgccgccttgcgtcgcgccgcgccatcgcgcgccacggctggcaggtcggcttgagccgtgcccgtgcgcgcccggccgcgagccgcctccgccgtccgatctaccgggcggtagatcggggccgtccatttggccgcccacgtggctgccgcatggccgccgtgtcggcgccacatcagcgccacgtggtgtgccgcctcctccccggtctgtggactcggtccaccgcggaccgccacccgtgtcactgccatgtggggcccgcatgtcagcgccgccccctctctctccagggttttaattattgcgcaataaatcatttagggtttttctgtttatagtaaaaacacagtgaatcttcttaaattcatagaaaattcatccgagctccgtttaagcccattcaagtctcagtaaatcaagaaaaatgcaaagaatccattaaaaatggttttgttctctgtttcagtagtcttatggcctatttatattgtttgctttgtatgtcgcttagattccggctctcccgacgctccggtgtattttgaaatagtcgccgaggttcctccagcagcagagcaaggcaagtcatgcttgtcacttgaacatgttgatcctatattgcaaaggctctattgttttcctttaaatactgcattgatttacaatgataccatgggatggttacctactgttttagctatgctatttgtaccttgctcctttgttagcttgggatataacatgactagatattggactagggattgcttagccatgcttagtttaactagcacacaatgggagaatcgcattaatgcatagacttcaggttctagtgttgatgttggattagtgccaccatcttggtgttggtcaattaaaatatatcatatggtgggctgtgggtgcatggttttgatggtcgcgcccatggcacttaaggaccggttcgcgggatgccctggaagaacttatcgtacttaccacaagccagcgtgggcaacggctgggcttgtagtgtagctttcctctagctgacacatccaggcaagggtgggcgtgatggagtttggatgggccttgcgacggcctatgcggcttccggattcacctaggcacgagaggggactgcccgctgccttgcgaggagtgggggtgaaacctgaggtgtggtgtgcttggttagagggggttatgcgaagggtcctatcacggcctctatccggtatgtcgtggtggcatgtcggcgcacggaaacgtgtcgtggggctgtcttgtgggtacagttgtacacctctgatcaaagtaaaactattcgaatagccgtgcccgcggttatgggcggtcaaccagattcaccgtgattagtctcaccctagcttagtctaatggaattgattagttcaggtgggtggttgggcctgttgcaacatggtgtagcgttggacagtggatggttaatattgattaattattacaactatttttctactttcaactactgtctttaaatgctcgctttatgcaaatgaaccgctctagctatcctttggttatatcctgcatcatacacctattccggtatgacttgctgagtacagtgggtagtactcagtcttgctctattttccccaaaccccagagtttgagtacgtgttagatggtggcttttccgaggagtaggcttcgtccgtgccgtcgaggatgcctgtgaagtggtattcccgctgcagtccaagtcaaggcttagctccagttatcttttaattttccgctgcatttatgtaaggcttttataatatttgtaagacgtggatctatatgtcaaatttgtcgtttgtgtaccccggccaggacgagggttttaatgcacattctgcttggaattctattcgggaatttttgtgcgtgacatagacactctagtaccatcagtacggcacactgtttgctctccactatcttctcttgtttgatcgcatattttatcatgcttgtctgtcaaattattacctgtgatttttgtttgaaaaaatgaacaaaataaatactatgtatgtctcaatattattataaaattataatggcatggtttcaatttacccttggtttattggttatatcacccaacgtaattcgtgctccattggcagggcaatttccatccatagctacctaattaacaagttgtgagattaatgaacatacttagctttacagtacatgcacatcagcacatttttccaaaagcttgatggtaaccatctaatacattactaaaaaatgttgccgcttcatttggtctatactgtaaaatgaagactgtaggtactaatttgaaaccatgaaaactgccaatccaagttttactaacatcaataatgacagctcataaacatgttgaatgagtatagcacctgttggtccttttagaaaataaataaataggtagcacaacttgtaaaacatgcagtaggacatattaatagtacgacctatagaaagcactcaatcaaagaccataatcccataaagctcaacaagccatattctcattatgcccaatattttagtacgaattatcctgtcaaattgtcttgttacaccttttttgcacatttttatggaaaggcaaaggatcacttgctgaggattacacatcttccacggcacagtatgtacctcctgtggcagggatgaaagaaaaatttagacttcaaaagtcatccgttaaggatttccaaaacctgcaatcaaagaaaatgcgattacaaaatccaatcatgttactaatgcctgaaaattaatgttttagacagatgaaagcaactcaaaagcaaaacatgcaccattatgcatgaaaatattgacaatacatcaacctattgacagtaccatgcaagtagatgtatgttaacagcataaaaattaatagatatatataaatagattatactcttaacattttgtacataactttgcaagataacattatttgactgaaaccatattcttgtttacttaaattcaaattcgctgatttccagtaaaagaaattcacattcgcatgtactcaactgttgctataagttcatattatttattcacaaggaacatttcaatagtcccactgttgtatgctatggtggtagggaggaaaattatattcatatatatatatatatatatatattcatttttattcagtaagttttcttgataatggccgttgattatttaatatgtggatatgcatatatacacattcagccatggcactatacttcacaatcacatccactattatttaatccgcatttgagtttaaacagtaatggctgaaagaaaatgatcgagcgatgattaccttgttcgcaacgcagtagagaggtttccggtcagggtgcaaaagatatcacttgacggtgttgcggtagagaagctgtcgcaggggcaaggagtcccggtgtcggaatcacggcgcggctggtgtcggtgatctggaggcggaaatcactgccattacatttttagagtctaaagttctgaagtaggtaattcttccttttacccctaaagttatgaagtaggtaatttgacatcacatgctactggagctagtttatggtacacaaaaaatatacaaagatttgatggaccataataacctgtaaacctgaatagtctacaccctacagattacaaattgtaaaaaaaaagttgaatataatcctgaaaattaaatgtcctgccatagtgccatcaaatatttcattcatcacagctgaaatgtgagcatcatccctttcacattaatcactatcgactatacttattttctctgtcctgtctaattttgttgaaaataaatatcccagaacaattcgattagtggaacagaactctctagctattgtattttacaataactgatccaacacgaacaattcgatttggactcattttatatgaaaatccaaccttttttctctaactgaagaaatatttttttaaaagctcatagcacgaaaaccgaaccctcaataatggttactgttactttagctttttctgttgcaatacacatccacacctaccatattgttgccctaaaccagctaatttttttacaaaataaatacctatgatccaacctgtaaaatgaagtaccatatgttatcatcagttgcacagttgcaataacataaaaaacccaggaactctctttgccaacagaaaccccgtaagcttgagtgaacgtatccaccggcaggaggtaggaactctacaatgtacaataaaagttaacttttttaccttaagaaatatgccaagatgaattggtcgcttctgctcctgccagatgacggcgatggatctagaaaaccaatgtggtaaagttagtgtgcaattcattcatcattaaaatcaaaatgagtatactgaatactcagaaagacccaaaaatggtatcaccaaattaagagagaggaacagggatgcccttctctggatggtcgtcagtgacaggtggaggtcgccgtaatgatattcagagattaattctgaagttaaataatcatggaatacgtaatatcctaaatagaaaggtaagtagccgtgtattaaaaagctaaatactcataacaggctccaagtttgccttcataacagggtccaaggagctcattgtgttgttttctaaaagttgcaacttagcagtatcatttggagaatttcataatgaactgcaattgcatgaaaaacaacacatcgctaagtaatccccaaacaaagttatgattagtgacatccctacactcagctatttatatctgaaattgtgagcgtgtcggatttcaataacatattatgaggaaaaccatcaatacgttccaaaaaaaaaaccttcaaggagcaaagttgtaaaacaaatattatgagcaatatatattttcttcataaggccaatcaacactgattcatcttaatattttatcccgtctataaatttagggtgctatacgaaggaacctcctcaaacacagccaaaacacagtaatagccttgtcgaaacccttgaaaagcatataaatcagtgcactaaatttctgaatgtattgtaactaatacatgtatattaagaaaaatgttaagctgcatcagaatatggatgacagtactaaagaccataggagaacatgtaagtaaccttgaattaaataaccgtgaacaactgacatgtgtaacaagctaataggtgttgtctgatttaagagttagataacccgtaccggtcacttagttggtgagcaatcgactttaagataataaagtacagtgcagaccagcaccattcttatggagaagcatatcatacacttatttgtcaaataaccagtgaagtgcaactcaatgtactatgatatttgtaaaataaaaagtgtggatagatgccctctctcaatctttagaaacaaaaagtgtggatagatacacttattttggttgattctttcagatgggtaataaagagaaggggtgaggggggaggaggatgataccttccggtgaatcaggtcgaggcgggagacgttgttgaagaggccaagacaagtggacgcgcggaggtggttgacgaggtggagtggaggcgattgatgactcacataggagcggaggcagttgacgatgcggagactgggggcgacgcggtgggatgcgtggtgacggcggggagctggggaggatggtgtcaactgtacatcattgagcacataggcaaacaattttatgagtttattcagccagtaagcagcaaactgctgccacagtagcaatgctacacaccagatttatagttcaacattaccatcccacttaaatgagaaacatcccaaaattttcatcataagaaaaaactgaaaaaaaaagcccaatcaccctgatctcaccaatccggatgtattagttcaccccattccataacctgatattggcggaaacattgtatatactgagcattgcacgtactgaacgacagcaattggcattgtgttagcgctaggcataaactaaccggtgggaccacgggtcacggtgcgtgacggcgaagcatgacggcgaactggccgcgtgcagcggggagtgggtggcggagcagatcggcgtcggcggcgacgtggcgacggagggcttccggtggcggggaggtgtgggagaacgggtctagccgcacgacggcgaactggccgcgtgcagtggggagcggggagtgggtggcggggcagatcggcgtcggcagcgacctggcgacggagggcttccggcggcggggaggtgtgggagcacgggtcacggcgcgtgacggcgaactggtcgcgtgcagcggggagtgggtggtggagcagatcagcgtcggcggcgacctggcgacggagggcttccggcggcggggagggacacggtttggggaagcgatggagggggtcgggcgtgataggcgacggcggcgttggagagggaagggagcgacgacgatggtgaggcggcggcgcggggcgatgggagacacggctagagccgatgaagggggcgagattggggcgattcacgggaatcacgagattgacggggcaatcgcgagaaggagccgcgtggacgtggggaggagcgcggagggagaagggagtaagctgcacacgatctggaccgttggattatagagcaggtagatatgagccgttggatatgtaaggtgtaagagtgtaaggatgagatatgagtaagatgagttggtgaattatagggtagatgactcatctttatatagatgttaaaaaatctagacacacacatgtttagattcattaacatctatatgaactagctgggtggcccgcgcaattgcgcggctagcaaacaaacaatatttttcagtatgattttatttaaaatttattaaatagctgaaagaccaaacattatcatccccgtatttctaattatataatttttaaaagtcgccctagctgctaccccttacttctatcatatccttctttatttgcttgctcgatctaccactatttttattcattctctttgaaacctttaaaaattggatcttagtttttagaggttattgtctcactgggtttcgtttttataatttctagaagtcccgccaaacgctgccattatacttctctacggcccgtccactgtcttttttctttattatcattgggattttaaaaatcgaacataactatcattcaagttcattttttactttctaaaagtcccaccaaaccgtcagcggctttgtcattgtacttctttatggctcgcctgttgtctcccttttttattgtcattgagattttaaaattgaacatgattatcattagtttttttttttactttttagaagttctgaaccttaattggaccttgtagtttttagagtttattgtcttgttaggtttcattttttgtaacttttagaagtcccgtcaaacgatgtcagtatactcctctacggcccattcgccacctactctttattgtcattgggattctacaaatcgaacataactatcgtcggaatttattttttattttctagaggtcccgctaaccgtcggcggctctacaactatactcttatacaccccgcccgctgcttctcctttttattgttattgagattttaaaaatcaaatatgattataaatggggtttatttttttactttctagaagtctcggcaatcgccttgctcgtttacttcacggcctgcctgccatccctccttttaatcgtcattaggattctatttgatgttttattaacaatttttatatgtagtatcaaccgcaaccactctatttctttataggcatgttacttaatttatctcgttatgtgttttagatggtcttttctttcaatagtctttattttttatcaccaattttagttatttataaattgtattcctaattaaaatcttttttctttttataatttcagaatttatttcttaaaaatcttttttcttttaatatttttatatttttatttttgaatttcaagtgtttcaaaattgtattcctactttgaactctcttttaattttctaattttggatattattttattttttattctgaattttaattaatcttgtattgggctcttatatggattcttctttcaatatttcttatttttaatttcaaatttcagttaattttaaactgtattcctacttgaactcttcttttctttttgctgatttcagattttatttttatttttattttgaatattaattaatctcatattgggttcttatacggattcttctctcaacattccttatttttaattccgaaattcagttatttaaaattgtattcctacttggactctccttttcttttctaatttcagattttattttatttttattctagattttgattaatctcgtattaggttcttatacggactcttctttccatattgcttatttttaattccgaatttcagatatttttaaactgtatttctatttggacactctttttctttttctgcgattaatgtgggaatttctagcccccaccgcgaacatagtgcctcctttcaaagctgttttaataatataatagatagatagatggcaaaatctaaatcaagaggcctctcgttttagtgctaacgagagaccctatctagatatcaacatgtaaatagaaaatatattggtatcacctatgtttcaaataaaattctcttaaactactcatccgatttacgatccaattacacggttgtgttcgtaagaattaaatctttataacaagatctcacataattatattttgaggaaaattgcaaattacttttatagtatatctaaattacttttagatttcactaaactacttcttagacatataaaagtaatttcagtaaagctttaaagtaatttacatatattatagaagtaacttaaaacaaaaaggaagtaactttgtcatgacattaaaagtagatccgttatggaggtaaaagtgtgagtatatctagaaattaaatttaattagcacaaataatggaattgactaaaaatgataataaaataaacaactcacaatattatgaatgtataataagtaatttaatcaaatcgaaaagtaatttatatatatgataaaagtaacttagatatataataaaagtaatttacaacatagatatttcttttatcaaaatatagtcatgtaagatcttgttataaagatttaattgcaacgaacacagtagtgtaataggattataaatcggataaataatttaaaagaaaaatctagaagaagaagaaaaaagacatgtatcatttggtgtcctagtaggcaagatgagtctctagttaagacaatatagagtgcggtctctgtatagtcagatctatagatagatagatgtgggtaatgctagaaagacttacattatgaaacggaggaagtaataattattaaaagattagtaactttccaatctccacagaaaggggctgttcagattgatgatattttcaacgataccattttttttttttggtaaagttgtcaaaaaaaaatgttgtcaaactttagtaaatatataagaaattctgccaaaattttggcaatattaccaacttaaggtttattttggctacaatctaaacatgccttaatttttttccgtcaatccaaccaagcggcaccctccatccctccgtccacacacgcgaacttacatcgcgtacaacggcaaaaataaaaaaaaaaacagtccgatacaaaatctaactcgtgtgtgccggacaaataaaaaaaaatcaaagatcgattaacaaaccaatcgaacaatcattgtaagtattagaactacactgaccaataatcccagaaaaaaagaataaaaatcacacaaatccgaaaatatgacaaactgctggatcagataagtcaaataagtggagaagattatcagcatggtaaacattaccgaggtggtgctactcatattccatgccctcacctcgtgccaccgagcattgcaggcgcggcaggacaacgaggaggagaaggcgaccatcaactattcggacacagcccaatgcgcacggtccaccccctcaccagtcaccacgcatcgcgaggcttcgggttgaccggcacggcagagcaacggggagaaggagaggcggcagccaacagctcggcacaaggaccatcggcggcgacggatgcgcgacgtgaggatggaggaggaggaggaggaggagaaggaggatgctgttggtgcgaaggcggcatggtgcgaggaggaggcggcgtcacttggcgtgtgagaagcggcggccggtcaagtgcggcgcgtccgtacagctggggatgggggttggggggagttagggtttcagcaatgttgggcctggtggatttgggttggctggctaggacacttgggcttcttttccaattcggtatggaaggccccaactaaactgaaaggaaaaagtacaccgaaggtccctcaacttgtcagcgagataaaaaaacgtccttgaaccgcaaaaccagatatacgaggtcccttaactatataaaaccggtcacccgaggtctctcggtggttttgaccccggttttgatctacatggcgactgagtcagcatgggacccacgtgggtcccacatgtcaggatgccacatcatctctctctttcccctcttctctcccttcctctctttctctcactttctcctcgtctgctcgtctggtggccgatgcgatgcggcagcgacttggtgcggcgccgacgaggatggagaggcgggagaggagaggaggtccggcggccggtgaccagtgaccggcaggggaaaagagcagcggcaaggcaggagcaggttgaggagagaaacggcggcggccatgtcctcttcccacgggccgccgccacggatggggagtggcggcgcttggcctcgtcgtcatcggtggtcgttatcggcggctccgggcagggatacagcgctcggcctcgtcggcggcggcacctccgggcaaggatagggcagtcgccgcttccgtgctccctgccatggatggagagatcggccttgtcgccgtcggctcgccgtccccttcgccgacctggccgccgcctacctctctcgagccgcgccacggcacgccggcgcagactcgggcaccaccgctcgcgccaccgcgcgcgctgccgtgaaccgctgctagccgtgccccgcacagcaccgccgttggccacgccgccgcacggagccgccgcgcgcgctgcagcgaaccgctgctggccacggcgccgcacggcgtcacaccgagagccgatgcaccccgaacagcgccgtcacgagccacggctagccgtgccgccgcacgccgctgcgggccgcagccgactgcgccccgcacggcgccgccggcctctcctcctcctccctctccgcgccctcgccgccggcctctcccgcatcgtcgcagccagaggagccgctccctccgcgctaccgccgccgctggagaggccacccccgctgccaacgccgatgatgaggcccgcgccctcctccctcgcgcccggagtcgccttcggccggcttacccagttgcacaaagaagataagagaagagtgagagagagagagaggagaaagggagaggaggggagaggaggctgatgtggccagctgacatgtggggcccacgtgggtcctacgctgacttagccgccacgttgaccaaaactatggtcaaaaccactaaaggacctcaggtgaccggttttgtatagttaagggaccctgcatatccggttttgcggttcgagaacgttttttatcccgatgacaggttgagggaccttcggtgtactttttttaaactgaaatccctcagccacgggccttcatcaacaggttcgtaccttgccacacgttcatatcaatcgccatgcaagatcgtcggcttgtattctgttgtgacttatttttttactctcgagcaactctaaccttaatttatatttatacatatttacgtaaaatatttaaataagataaatgatcaaacgttatatgaaaagtgtacggtgtcatatatatttttcaatcaaaattttgaatccaaatattagttgatagttggtacttcctccatcctagaatataagcatttttagagttacatacagttattaagaaggtatgtagaattaaataatgaagaattgtgattggatgagaagtgaaggtaggtggaaaaattgaatggtggatggttgtgattggttaataagagaatattggtgtataaattgttatattttgagataaattctggaggctagctagaagttgttattaccaattttctgatatcctgagtaacatgtatttattaaccttagtcatccatagcgcggacacaattagtgaacaatatttaacgatgatatgacttactacacaataaactggcttttttttatgatctataagaaaatctgttacaacacaagaagaagaaaaaatcacatatgagcgtctgccttacgtagcaatggaagcttcgaattagtaatgaaaatctcaatcgatttgatagccttctactcttcatgtacacagttttttcttgggcttccttcatcatcgtggtcgtggaattgttatgttcaactatttatctgccaaagcacgtgcacaactaaaattaaaaatgctttaacccattgcaacatataggcttttttttctagtcttaaccttagctaattaaaaaatttgtaactttcctttcgtcacctctctttgtttccgcgttttcgtcatgtatgtcctaccacaatccgatttagttaccgatagaaagaaattgcaaaaaaaaaaaccaataaaccacccacgaattcgtagccgattcatcactgattcacctccacgtcgctcccgtccgtacaggagatcaaatccgatccacatgagccgagaactccgcacggaaacgagagaaactaaatcacaaaatcacaaatccaacaacaatgaatcaaatttgtgaaaattctaattgttgtattctgatgttttctgatctattagatcgaccctctcatagaatacatataggagtacataggagatagaaacttagagtacaatacaagtaaaagtagatttatctctaggattctatctctaggatacatcttatctatatatttgtatttgactcttatctctaactaacatatctatacttctaacattccccctcagttgtaaccggagtgaagcgaacaattgcaactggatttgaaatcttctatttcttcatcttgttcgactcaccatcattgattggatctctgatggactctcctctattccctctcgcagttatagcgggagtgtcatagatgatagcgatgacacgtacgctttgactagagtttccgtcaatgattgttgttgtagacattcgtcgatgtagctgatcatgtagtagccgtggttgtaggtgtagccgcatatagccgaaggcgaaaaaacatatttatgacatgtgtagcggtcatcacaatggtgatgccatgttgatgcagttgttgtcgttgtagataacatgatcgatgccgtagtcgatgacgcggtcgatgtcgtcgtcgatgaaccgtcttgcagattaatctgtcagaggaggtgacgtgtccatctacgtggacgagtcggcggcagcaagttgatgaagataactagtgatgtaggatcggcgaagatgatcacgtagtcatttatcgatgtagcagctggctcgatcttgccgtagacttggtgatgatcgatggatgacgttggtcttggagtagatcagtagatgtacatgctcggagctgattggatggtgttgccgttgctgcttgttgttgatctccaaggctccagcgctgctcccgggcgacacgacagtactgatattggcttttacgtggctaatgaaggaattgatctaatctattactaattaatggaaaatatatctaatgagatcggtggataatctaatatatagatgataggagaggatagctagctaatgtgttgcccaaggagagcttacggattcatctcatctcgctagggcatcacgaaggatgatgggtggcatcacgaaggatgcttggagtacaatacaagtaagagtagatttatctctaggattctatctttaggactctattttatctctaggatatatcttatctctatatttgtatttgactcttatctataactaacatatctgtacttctaacaaaaatcatccccaaaaattataaaacaactaaatcacccaggtcactgctcatcagaggccaagcacaccgcttccctaaggccatggcggcttggcgggcgcaccgccatgtgccacaaggagggtgctaccaccaagccgcttccggagaagagggtgaagcagctgaggagaggacgccacccaccagggaaggagctctgctagccgagtagagggcgcggcggctgaggcgctaaccaccaagggtagggcgctgcttgccagggaaggcgccgttgcgagggcgccgtgagccatggcagcgggagcagcgacactgccggtgggggtgggagaagggagggggaaagccgccggtgcgtggggagggcaccgtggctgaggtgccgctcgccggggaaggcccatgcgagggcgccgtgggccgtggcggagggggagagggagcgggagcaccggcgctgccggtagggttgggggtgggggaggtcgaggggaaagccgctggtggggaggttgggggggtcagcagtggtggcgttgatttctgggagcggacggagagatgcggcatcgatttgtgggggcctagttttttcttttctttttcgaaccaggaacttgtatatttggggaagttgggatgcatgcatctggaaggaagggtagctggagactgggataatgtcctgtgtggcttagaggtgggccaaggctatgaatgtaaatttttctaatgctagagctattttgcatttttatttaggaagagcatattttagtaaagtttatagactgatttaaaaaatacaaagggctaaaatgctaaatcatcatgtcccatccaaagcaactctgcattgtagagtagtatctctctaagcaacgagtgttctggtctccattcctcatgccattaggcagcattcttcaccgtctcgaaactcatgcttacagtttaaggccttctattgtcaaagtttgggttgattagatttgattgtctcgacaagaccgtgttcccacgcgacacacagttcatgtcaagttttgatgtaaaactatattccaatttgagacacgtaggatttgattcatcgttgtttccacgtttaattctgattgtgttctactcggccctctactcctctcttgcctctctacctaaggtttggaatgtcgcgatatccaagcaccattgagcgaccaccctcttttcttttactccatcgctttactcgaccattataccatccatgctagctctatatcttgaattaactttctcgccttttcttttcttctcgatcgcagtcaatatggcaaaatgacgatggacaagtgaaaacatgtagtcatgtagataatggatgttatatcactagaatcatttcaatatgagagaattcttccagaaaatcttagtgtgttaaagcatgtagataaaaaatctattttcgaacaatctatgtgaagaatatgttttcttaaagggcttatatcatgaaaaactaaaccctaatcatctaaagtttatatatttggtacaattttagtttatatattttttctattacaattcatatattcgtagccgtgccactagaaattttataaaattgaaaccgtgccactattatcatgttttccatccatctccttccttttccaatcgcctcgatgaatagatcgttcggccagctaatttctttgtacacttgatgggcttcaagtcttgcattcgatgtttagttgatgcgtatacggaataattgattgatgtattggattaggataattgatgagcctattatgaaatttacccatccttattatacacgatacatgcatatacgatggcattggctatcggatttgcaccctaggtcaccatcgccatcggatccaccgcccccgccccgaaccgacaccagatatgccgccccgcagcccgcagcccgcgactgaactccacctcctgtggcttgacccccaccgcccgagctatgtcttcggtaccgctgcctgcgacccaagctccaccgccgctagctgttggaggaactctgcccacggctccccttgttgctaccgtcaccccttccgtcgaaccgagagagggaggagaggttgagggagtggtggagaggagagctagatctgagtacgagggagaggtaggtgggagttgtgagaaaaaaaggaagggtgttgagatagtttgtgcattgccttcgacgattttcttttctggcttaaaccccgaatttttacgtggagtcttaaagagcgtcactcgtaaaaatacctctatttttacaagtggcgctcttgaaaccccgtcaataagaatctgtaaaaatcggtttttactggcagggctagatgtttagggtttcattttaattttttgagcaaggttttgtagtccgtcaggaaaaacaaatcgttttggtagtaatgtcgtggcttctggtatggaagggttaaatatctatctcttccatatccctgtatattcttatatattgaaacatactctccctggttttaatactccctccccggttttaatatatgacatcgttatataaatttataacaaaataaatggaaattacatattttttaaataaaacaaaagggtcgaatatatataaaaagccaacggtgtcatatattaggagggattatctactttaaaaattcatacattttttcaatcgtcaccgtacacactttctatcttggtcatctgtgcgtattttgttttcgttatctttcacttttcacatagctgccttgctctgcttttattgacaatgcactctctttctctcttccatcaaccttttttcccagtgcaacgcaggagcattattgcttgctagttcaactattatgtttgtcaattatccaagtaccctttgaggcctcactcggttggggtgtaaaaggccgagagaccagccttttttcttggccacttcggggaagctcaccatccagccactgcgtctttcccaacaagaacatccagccatccaggacctcatcatcttctactaccttttctaggtatgtcaaattccatcgacgattcaagatggcacatgcatgctatcaattggcagcattacgtgtacaatttcactcttttgatatttgtctgttcgctgatgaaatttcaattttgagcactgtttatacttctttcgaaagttggattgttctagcgtgtgcatgtgtgcacggctgagttcacctgatacgttgctatataagtgaggcaattttttttcacatctaaagacagctaaaatttaccacattagccactatatatctggtcataagactattagagtaatagataattaagttggttctggacaacaaaatgctaaaatttgacaaaatatcaacaaaatgcgcgacttgaatgttgattctcccaggacattgaactaaactgcgttaaatattaatttcacccggagcgccctatatgcagcaataattgcaaaccacaaaaaatgtgtttttaggtgaactgtgaacaattttattccgtatggtgtgttgcactatgaatctaaagctgtgcattacaaaatttaccacgaagttgattctctatgcaaaaacaccacaagtttcaattgtcagactgccaagtttcaagctgtagaagctaagagcctgctcatactagactgctcgatttcgatattctctgtgcctctcctaagtcatcaagaaatctgcaatttgacggtgaaaccagatgttaaaaatcaattcagagttattgcacaatatcaaatcagcaaaaactgatgcaacatatcccactctatgcaaatgggaagaattgcaatgaatatacctctttgaatttagaaccactgaaccaccaagaaagaaccgaactccaggatttgctgcattgtaaagggctactgatcttgcttcctcgtaagtcgtccctccaacaatgaacagcacaacatcttgaggcctgtgaggagagtatcaatcagccagtactcctaaaaattactccacatttagaagtaaaccatgctgacaacaaaagaatgtggatcagaattcagaaaattgaacggaaaataaaatgttacttcagggtggcaggattcaagtccattcagtaaaacaaagtctgattaaagaatttagtttcacaatcgtgcatatcctaggactaacctgttctgctggaaatgattgccaacaagcggataatcagcatctcgtaatcgtgcctttacaattccttccatggtctgaaagagaagaggctgatgttgggtgtatacattctcaacgccctgcaaccaataagtgcataagaaataagccacattacatgtaccacaagtgcgaaggaagacttttttgtctaaccttgagtccacgagccatgttgcgagcaatatttaatagatcacggttcccatataagtcacctgttctcttatcaacaccagcctgtttgaggaggaattgaaccagctgcatgcaaaattagaataagtcatcagtcaaaaaccatcagtacaatatggctaggtattttgtctccgataataacaggcagccacctgaagaggcccctgtgtccattttacactagcacgacaagtttaattcacatagtgtaccaagtggaaagcctgctcaaaaacttagtaaaatatattacctattttgttcaaaactggtagcaaaatactccctcggtcaaaaaatataagaatttctggagttagccacaggtattaaggaagtagatagaattaaattggaaaagggtgattggttgagaagaagtgggtggagaaattaaatgagatggttgtgattggttcagatgagctagtaggtggagaagtttattatattctgggacaaattttgaatgctagaagttgctatattttgggatgaagggagtacttagtaaccaaagaaaaaaatgataactaaacctggttaaaaacactaggattccaaataaattgtagtctaatttttaaaatattcaagccaaggcagtagacttatcaaacagtgaatcagtgctcccagtacatcaaatgaaatcaaggatgctttttagaagacctcatagttcacaacaagggaagtccatgatttgcacaaaagagatagttactatgtgctgaaggcacgtaacagtgatgtcaagactgcaattgtttatggttcaaactgtgaaagcaaaaaccttccactaaaaataattacaaagaagatgaacatcaaaacaacatataaaatagaagaacgcttagataagaacatgatctgtcactagttaaaggttcatacccctgacttgtatttagcagaacgagaagccaatttattgaaaagctgcatcaactgaaccggactctccttttcatacctcaaagcatagagcaatactaaccgtaaacgatcaatatcagacacactttcattgtttagcaaggaagtgacagcctgcagaaaatcaacaggtgaaccaaaaacgtggaacagaccacttatacattttactagcatcaaatcagatgagataaacaatgagaggtgatgtaaggacagatgaaaaactgtaaggggacgtgctgctttgattcatgcagctaatggtggcaaataaagcaaagaaagctgcataactcttaagctatgtagaaaacaacacattttccaatgcacacagcccattcaataagatattcaatccaaaagcatgagtcaattgagtctacatttaattagactcaaagagattaacaggcctttagttcaatcatggattgatcagctgtaatttaagtctttagtctttttctttccactctttttgtcttccctgtaaatactttattcttttataatatataccgtgggtgcctcccccactgtcttttgataataaaaaaaaaagcatgagtcaagttgtaaatatattttggaagatcatccgtgccacagttttttagtgtgtataagctaaagaactatggtataggtgtaattcccattttggaaattgcactggcataaataaagaacttaagtgaactctagcagcagataaatttgattgaaaatgaaaaacctcgggagggaatatctttggtggtgaggatattgaacatatatgatattttataagaacaatgtgtccacggcaccatgatatatttcatgttcattataccaatacctcgaaagcagctgcttgtccacttgtacatgctaactcttgctccgtctgggaaattagcataatcttcctttcctccacaattctgctcatctcactgaccaaagcaacatgcttcgttacatttccatgagtcttccgatattcagggtagttgctcagaaattttgacatatcacctaaaaccattagtaaatcagacttttagagatgaacaccaccatcaaacaaaaatggcaggctggtaacataatatttactacaggtactttgaccaaattatcacaaaactacatatttaagacgtcgtatctcaaaactacagatttaaggccaatcacaaaactatagatataatattagagttatcacaaaactaaatgttgtagttttgtatttaacatgatgcagaacatgtagttttgtgataattttattactaaatctgtagtttggtgatcttccatcttaaatccataattctttggtaagtttggtcctaaatctgttgttttgtgacagtttcgtaaaggtatatgtagttttgtgagagtaaatttcacccttttatttaacacccccccccaccggccctttaattcccctcattttggtcgccatattcataggtgatatgttaactcaattagcaattgccttgtaggatgttcaaatccagttataataggttaatggtgtttgaaactcacctggatccccacccaaaacacaacttagctacagtagtccaaacgaccccaaccattgactgattctcaggatccagactagaccaacccattttccacctgagcccaaactgaaccagcccattttcctcctatatgagtttagaatccactttcccagaccatttcagctcactctaaatccaccttaaacactcagcccatttggccatttggcccatttgccaccaataacctgatctgtgaccatcggccatggtctcgccaccacgtgcaagacaaccagatccagccactgctgctgaggtggaaaggaggacaagaactgtctatggcgatagagggaaaccagcagcagcaacgtcaactgtgagtggcagctctatatcgactggtcaaggacgacagcgagcccctacctgttggggcactgcccaaggatgtcggtggaatttggaaccaaatcgtgttggcagtgtctaatgagtatgagttaggaagccaagccaacagggccaccaatggtgaaggcacaggtggataagacagcaacagcggtgcattgggcccagaagtgccggcaggcgggctccagtggtcgacatagatggagaagaagtggatttggagttctccctccctctccctctaagctgtctaggggcacaaaatcagcgatggaggcccgtaaccacaagtgatactgataactcaggacaacaaaatccccaggaggatggcagcaaggtccaggagtctgatcaaggctgccaacctgaaaccacatgtccccatggatttatgaaactgtattgggcctgaaaattagcgaccaagacaaaaccactaccaaacaatttccagcttcacccaaaccaccccagcaaaaatttaaaattgacgcataaacccattcctacccaaaccattagcaggcctactcatgaatgcttcttcctaggaccagcttgcaagcatcgtcagcaacccattcaacacttcaatccaagtgcacacagcccaatcacggtcatcagcttgccatgacaacaatgcacatgcattaaaatcaattaaatatcacggaaccctaggtattaattatggttcatgttgcacaaaaccacataggttttggtatgtggtacatagattttatacaaccttaaccataatacctgggattttgtgaaatttactttttaaaatctaaattggtgaaagacataaaatacaaaaataggaaagaacacataaaggtcaatactcactcagggacagtggtggatccagaaatttttatgagcctgggcaagcctaacaacaaatatagtccacacaattctattcaaatccatatatcattttgtaagaatttgctttgctagtttgcgctaagcacgttaattaagtatgtaaactatatatattgctgctgcttcagttcatacggtgactaagaaagacgattagcaaggaaattaggtgtaatctactggggaatggctacgtgcagccggcggagcccaggcaactggccctggctccgccactgctcagagatatgtacttatactgcatgtgcagcccattagggacaaaagagcaatcagcctccctagggctagtggtactccaccgtaaacagtacacacgaggctactgttcacgcgtggtactgtacatggcacaggcaggtgtttaaactagataggatgagatttacttagctatttccttaatctcagtgatatgtttcttaagagtcaagtcatcactcatcccatgaggatgggatagtatcttaagcaagaaatgaactccatgttctattgaacttattcaccagattactgaagtgggttatttgctccatgcttcgaaaaatacgttctcaaaaaaaaaaaaaactttcttctatttcatcgcttggaccacttgttttgagctatttgttaagtttatttcttattatatttaatgtatccctataattaaatcgataatctgctgcaataatctatatcaaacggagccactaggctttagactcttcctcttcttccctgcccttgtggcacggcagcctcaacggcaccattgcgctacttgggtccaacgacacctcgaataggtctaaaggcccttaccccaactatgcacatcacatatacacaaaaatatacagaaccaaaacctaacatgataagaaatggaattttagcagcattggcaagagaaacaaaattagctgaagtggtccaaaataaacatatgtaagtatgtattacgaatgctagtgaaaagtaaaaattggaagcatgaggttgccaaatgtaacaatataaagaagggtggctagcttaaacattactttcagggggattcacttattctccattgtatgtgtgactcacatgagtcctgggactacatgtcagtgacagcaaaggcaaatctgcactgcctactttccagtgacataattgttttttcctttctttcgtaggaaacaagaaaggcaaaagtttcttacttatgctctgaatattctggctggtcttcgaaagatgttgaaagtcatctaccattcttttgatattcataccaagatcaccaaaattctcgaacatgttagccctaaaaaattcatcctgaactgatgatagaaccacctcctgtgtaagtatgtttcagatggatcaacattcaaaaaaagatgcatgttatcacaatatgaacataaattcaacattttgatagaccttctggtctttagggacattaggatattcccttagatcaactttattgttctcaattccaataagttcatgaaccattgcctgtgtatgcaaaattgcaagaaagttaacacaggtacaactgaaatatgaaaaataacggtgtttatttcctttatgatacctgatatgtccattggttaagtaacggggtaacaggatcatcccttctgtcaatcaccagcaacaaggaagagttctcagttcgtctaaaatcaaacaagccactttcctgctcatacatcaatctctgcaggacccagaatgtaagtgattcagggcaagttcgatattagtggctattttgaatagttagcagtttgactgatagaatatgatccttattattggaacattttggataacttatctaattaggcataataagttggtgttatgcgcttggatagtagaagtctagaagagtacctgggtaggacataagaatttgatagtaaaatgaatgggaacaggaggcaggtagaagagagattaggcaggaagaattgctgacatgagggacaggtagaagtattttgtaaagactgcatgatttccaaagtgggtgatgtacgttctttataggagaagctggcctaacaaatgatctctaaagataactttgtaactactacctcccaaaatataagggattttggcaacgcacctggacaagcttgtccgcgtccgttgccaagatcccttatatttcaagacggaggtagtagaagataagcctagcgactgatgaaaattcaatcaggaggctggaagtgctccaggattgtgccatagaaagcagctaagaacagctagtcatgagatgagagatagaaagagaagattgtgtttaaatgccagggaataattgacattgtgtcaagggacattgtacctattttttgagttaacaccaaaaaatatgccgaagtaacaaaacagaaatgtttaaggtttagagtggcattccaaatattttttttagtctggcatgcatacaattctctctaaaaataaacacaatataaaaaagttatcagtatcaatttatatgttcataggatccaaatagacatattttacaggggcaatagactcaccgcagtttcttgtgcaatcctttttgcaacatcagatgtcctttggtatctaataacaggacggcgcttgagagccaggaagacagaagcaatgccatcaacagcccgatcacagaaactctgcataccaggaggatccaccaccattggaagcatgtagacgtggttattgcgtatgttcagcgtgaaatggtaagggtcgatggcacaaaaatcagcatagaactcctggaataagagagcaaaacattaatataaaaatcccatctcctcactctactcacaaaaagttcgttgcaataagcatataataccatatatatcatatacctgaacttgctgcacaacctcctgctcatcggaatctgcgagcacctgaatctgtggaatcttcaatacattggagaagactgcagacaatcaatcaacaaacaaataaaaaaaaaacactacacaaaacattacatttgcacaccattaaaccccaacatagaatgaaactagagattatgaaatcctaacacctacacgcacataacttggagaatgaccacacaaaagcatctaagattcaattagcagagtttcaaccagcgaagaggaggtggtggtcaagttgggtttgatcacgtaacaactagtctgtctaccaaattgtctgcacctctcaacctaacttaagtcttaagaaactcatacaagaaatcaagcaagagggtgattacgcacagaaatgcaagaaagaaaaaaaaagagtgaaatacatggccggtccttaaatttgtagggtggtgtcacttaggtccgtgaacttgaaaattgcacgtttagatccgtgaatttggtttaatgtaccactcccggtccaatcatcctttgaccatgtttgaccgccaatgtggcatgccacgtatacaacacttttgtgcttagccccctccacatatacgttcacacataacttgccctgaccagtgcgtttcaacccaaatcccccaaaatatccctaaatcagctagggtttcgacggtgaggttagcagaaggaggctgagaggtagcagttgtggcggcctcggcggtgagattagcggcaggagacagcgcagtgcagcggggttagcggtggcacagtgcggttggattagcagcgggaggtagctcaatgcggcttgcacgctaggtatccccatggattctccaagcttgtccttgtcttgaagtcgccggaagaaggtgttgttgattaagtgcccgttgtgcaaggataaggtcattttggagcgcagagcaacggcaattgctaatcgggaccacattttctgtacatgcagggagaagaatgagagggaagaacgatttgaggtttttttttgggattctggtgtctatatagctacaaggagatatatgcgacatgttgtgatgtggagggggctgagagcaaaagtgttgcctaagtggcataccacgttggcggtcaaacgtagtcaaaagatgtttggaccagggtggtacattaaaccaagttcacggatctaaacgtacaattgtcaagttcatgaaactaagtgacaccactcaagggaccagccatgtatttcactcaaaaaaaacatataggtacgggtaaatgtagggggattacgcacagaggtggtactcggcgaaacgcggggcggcgagatgccggcggagcttctggacgttatcggaggaggggcggaggaagtagacggccttgaggtgcgccatggactccctggagctggaggcgttgtcgaccgtctccacgaggaacacctccttccggaggagatctgactggctgtacaccacgcttaccatccccacctggaacgaacagcacggatctggtcagggggtgatcggatcccatccccgcaggggagaagaggctagggttcgagggagcgcatacggtatcggggtcgaggacgaggaccttcatcccggggatgtcgtggagcatgcgatcgatgtagtcgcggatgagggtgatcagcgtcatcgctgcggtgcggtgcggcgccttgtgttcttccgtcggttggatgcgctgaggctggggatcgccggcggcgaggtctagccggagccggaacaggtgggaggtggctgttgagattggaggcgctcagtcggagactcaggacgagagacaaccagagcagcagcgataccaggcgagggagaaaattgcatatctaccatcacaaaagattggtttcgctataataccatcacttaagtggacttcgaaaaaataccacactcaatacaaataacttcgctggaatgcccttctagataatattgcccctagctcctcttctttctccttcgtgcgccgaagaagctcgacggcaacgactgcacgtcgtgggcaccaccgcaccagcaatgaaaaaaatggcaaaatcatccaagttgtcaccgtctcaatcagcagtgatgaatgcaaattacatggcatgaatcaatggaaattgattccagcgaaagaggaatcaatctcagggatgacaaaaaaatcaattcagccggatgatgcaaaacttttcctccggttaccttctatgatgccccaacgaggaacggccgcctacgcttgttgctcgttttattgcatacaggaatcgccaccgccgccacctgatgctcgtcgcgctgaccagccgctaccagcgccttcgcctattgctcgcgtcgagcaaccgccggggcctactactcacatcatcatactaaggaaccattgctgcagaagcctggtgctcgcgtcatcgcgtcaaggatcccccgccgccgcccgcgcactcacatcacgcgctagctcgtcggagccaccaccagtgctctgctttatttgcggatgggaatggtgtggggctgcttgctttatttggggatgggaatggtgtggatcttgggagacaacagttgtaccacctccacggctccaccttgttgctcgccatggcgtgcgatcgtcgccggcgagctttcttgcgctcgaaggaggaagaagaggatccagggacaatatcgtctacgatgatatttcagcgaatccgtctttgttgagtgtggcatttttttgaagccaacttaagtgatggtattctagcgaatccaatcttttgcaatggtagatatgcaactttctcggggggaggagactaccgattgggcactgacttcagtcacagcatgcgtacataaccactttaaactattttttcttttaaattatttatcaaaattataatctgattgcaccattaaattcattacaattaaattttcaaaacaagaccacacatggatatattccgacgaaaacaatttttagtttattattaaattatttttaaatgttgcatgatgttccaccaagtatatcggaattgtttcataagtagatcgaaaatgtttcaatcgtttaaatcgggtgttgtttcaccttatataaaaataatatttcagcaaatagcgaaagaatattttagttcactgcaacatttgatccatacatagtgaaatattataagtacactaggtgaaacatttttggtgaaaaaaaaataaaacgaattcacttaatatagggtttccaaaatatgtggatgatttgttgcaaaagaatgtttcgttcactgcaacattagatctatacatagtgaaacattgtgagtacactaagtgaaatattttttgtggaaaaaaaaatgaaacgaattcccttaatagagggttccaaaatatatgggtgatttgttacaatggagtatgtggtggagacacgtggtaggtagacagggacacgtggtggggcccaatgggagagacacgtgcgcgctggggcagcgaccgatcctgtgcgccgagtgccggtagaccgatccggggcattctccgatactaggggctgttttgggagcttgagaggctgtttggataatggactaaaattttagtcccatgtttggacactcattagaagtattaaatgtacactaataacaaaactcattccataaccttggactacttcgtgagacgaatctattgagcctaattaatctatgattagtctatgtaatgctacagtaaacatgtgctaattatggattaattaggcttaaaaaatttgtctcgcgaattaactctcatttatgcaattagttttattattagtctacgtttaataattctaattagtgtccaaacatctgacgtgtagtccctggatccaaacaccacctaagattctaagaaatggctggttgaaagccagcttctgtgagtctggaaaagctgggtctagttcattttttggattctacaactacagcttctcagaatctataccaaaagctggactgtttgggggagcttctgattctgggagaagctgcagcagctaaaaactctcccaaacaggctctaggagtgagattggaggagcgaaggatccaatataagagcatctcctaacagtctctccaaacctaactctccaaatgtctatttgaccaactctccatctaatttggcaagtcaaactcttagttactccaacagcctctccatctatcatctctattacaagtatgacaaataggacccatattttagcctcaactaaccttcttccatcctgttttttttccacccatactacatctcccttctccctcccgtactagtgtcccttccccatgccctacctcagtgcggggacgatgacttacatgcggaggcggggtgacggacagaagcggggcaacgggtggaggcggcgcgactggcggaggcgaggcggcggggcgacgggtggcggctcaatagagaggactaagggaaaaattagtctttcctcatcccaactaatatgtttggatcgcaaagacaggagtgctacgaattgaagaaaaaccagtggcctgtgcttctgatcgaagtaagaaatttgttgtgctattttttggtacccggttttttcctatgctatagatcgaattttctccctagacaaaccttttgtagcccctctcttcacttattgttatacttataaatcaaaatttaatgaaattggcaatagaaaagagggtagcgcacgagatctaaaatgaatgagtaaagggacggtccacgccttcttgacgataagtaataccttattaatatttcagatattgtatccgtcaagtgttttattgatctgacaatctgattatggttatgcccttagggagttccctacccaccttatataggtcggggggcagggttacgaggaagaagacccaatcggacatgactcggatcctctatatatttacataattgtatactagtaacacttatggaatatgccttgagaaacaccgcaatatatattccaaagtctagtatatttacataatatacgaatatggcccacatcctatctccagtcggataagctatccatgtgggtaaatgttaccataatctccacaatagcctctgagactttcatagtcgaaaagacaatcttctcccgaacttaaatcatcaaaagccgagtgcttcaatcatcttaacaatggtctcccgagtgcttttaccaaatcatgaggctgtcaagggttaaaaaaattaaaaacaataaggaatatatacttaggtgcatcgactaataggtgtagcccccgactatgtgattagttgaaaaactaaatatacagtcaaagagtaaattattcaaccagccaagtggttttaattcgcaacgggaaaattaaaattacatacaacatgagaatcaaaggagagcgaaaattcagattacgaacaaagttttaggcaggtcgagatattgagcactgatcaccaaaacatacaattaaatagaccaacaacaataataagtaacacaatcttccaaaccgcaaaatggcatgaaacaaattcagctaaagttttgaagaggagcggcagaagcatccaaacaacaccactgtgatacaactcgctcatgtttgcagttagaaaagataatcctctgcagtgttattatgttcgttctcaaaacatgcatgcgcgttcagagaagtacaacactttcagctgctagcgaacaaccaaggaagacactgaagtgatgtatggagtacagctgtacagggctacctttgatacgttagattctctctaaagtttgaagtacagttcacgtcaatagatataaccctccagcactacaagcaaatgacactacagcatcaaagaaaaacatcctacatgtagacatgcttgatggttctctgagtctcaggatatgaatattccgaatttcagatcaaactgtgtagaaattattgggacctcatattctttatccatctttttttaatcgtgtgcaaataatgtaaaaatagccaggctcatgctcaaggactactctatctactcataaaagatgaattcaatcgagtccttgtaatccagaaattcctccaactgcttcccactgcttatctgacgaagaaaaatatgggatcatgttcaggttatctggcctatctaggtgaatccgtttcactacaagataatttagctatcgccaccaatttattacaacaaaaaataattcgtggcgatatattgtactatcacaatgatattttttctgtggcaaataactatactttgctgcaacgatttatgatcgttgttttattcagtatttttgttgtaatagaaaataagttatcaccacaaaaaaacattactattgcaaaaaaaaacatgttctatcgccacacatttaatttttgtggcaatttgcatagtacatggtacttttcactattttctattgccatgatcaacaaattcgttgtaataaaaaatttattatctcataatttaacttattcttttcatatggacacggattaggacaaattttatatgaaatttatagttctcgatgagatctaaaacttcaatttttcatttgaaatattttagatactcaaattcatgattcaaatctcgttaggcagtctcaaatagaattatatgcatttttaaataaaattgatgcgtaggtgagttggtcatggagagcgcgcgtgagggagagatctttggttcgaatcctggccatgacaagatatcaaaagaaaatagttaggatgataaattaatattgaaacatttaatttggtatgtagaactaatgccacacatggagtggtggcaatagttatttattgcaacgatgtgaagtgttgcaatatatattttttgccacatccattttatggcaatatcaaaatttattacaactaaataaaaatcattgcaataaactattaccacgctatttattaccacggctagcaacgatttgaagattgtggcaacatgtatctattgccacaattttaacattgatgctatgatttttttcgtggcgataaattatttttctagtagtgtttgtaataatgaagaggattaaaacaaaccttgctagatgatgcaatatattgtagcaggcatagaaggctataacggcgaataaaaaaggctacagaaggagataatgcaatataaatagctggaaagtagcaccaagagatgatgaacttctgaaattttattgcaagcattggtaaaaagtagatgtgcaatttataaagcaaaacatggtatcttacccaaaataatgaaaatttcccatacgacaggcgtatcttagaaatttaagcaaagtgccccacatattactataatcctttcaggaatatttaccttcaaacagtactcaagatatttcagagccagatcatgacattatcatacttgtttgacaggcgacaacaatgatatgtgatagcttgaatctagtatattgaaaaaaaaatgcatggttattgtctgcagggcacataccctgggaatattactgagcaacttcattggcagtattttaattccagatggtggcaacatttttagtccagatcgatggctattctttcctgcatgccacgcacattaactgtaccacatatttcatcaattattcaccaattattgccaataactaaacataagatttctggtaaagaattggggacgactttgtataaaagatagttgtccagataagcgattcaaatagtgccctgtatggaattacattgtgttggattttcatttaccacagctgatggtccatttacctccattatgcaatgcaagtcatctcccacaaccaaattgctaggtgattgaatatgtttataaaggctgaaatacacacagtcgtaactcttaaggaatatatggaagatggaaaggcaaagtaatgatgcaaaattgtaaagaaaaaagacataaacagacttaagtgagcaagctgttatcaggcctacgtgtaccttgtgcaaactctcgatggagagggtgagagttcagagatgtaatgctggtaggcggcgccggtgagcaaaagcacagaggcgcgatggaggatgactccggctacagtggatctgagaagagagaggcacagtgatggaggccgggctggatgaggctgatgccaggtcgagtagcagggactcatcgtcccaatccttgcttggccgccacttccccctcgacatccagagggccgccagggaggaggggcgcccaaaggagaggtcgccgggctggatgaggctgatgccatgccaaggagcagggactcgtcgtccccccagggcaatccttgctcggccgccactgcccccctcgacgtccagagggctgccggggaggaggggtgcccgaaggagagaccgccgggaggatgcgccagggagtagggagggagcgctggggaggacactcggcggcgggggcggtggttgcgtgtgggcagaggagtaggcgtcggcggatctagagtggactcagaggcaggggcgtcagcggcggttgatggggaggaccggagaaggaggaggacgcgacgacagtagataggacggcgcgatcggtgttgggggcgtggaggagggactgacgataacggtggtcgccgcgggatcgatggatgcacggagagaggggatcgtcgtggcgaaggacgacgcgacaggagatggggaggaggatgcggaggcggtggggagggggatgatgcggcggcggtggggaggaggaggacgcggctgcggtgggtggtgagggtggttcggcggcgcgggagagtgggaggaaggggatcgggagcggtttagcgagaaagaaaactcacagcatcgggcgaatgggcgatggatgatccacgccgttggatctggcgattcgatggttgtgactgcgcgtgtctgtctagtgtctctgctacgtcaggaatcaagaccactactatagattttttaagtagtagagataatggtatatgtggtttaaaatttgagttaataatactcaaaatttggatacaagtgacactgtttgctatgctctcatttgcaaagaggccttgttttcttttgagaatatgctatctcttttcctcctgtggtcactaactttttgtaggagtatgaggatgtgtttcccaaggacgtaccaccggggctgccaccggtgcgtagaattgagcataagatcgacttgattcaaggagcttcactacccaactgtgcgccatactgaaccaactctgaggaaacaaaggagatttagcgtcaagttcaagaattgcttgataaatggtacgtacgcgagtctcttagtccatgtgttatttcagtgattttggtaccaaagaaagatgcatcatggcgtttgtatgttgattgtagagctattaataacattaccattagatatcgccatcctattcctaggtcagatgatatgcttgatgaattgattggctctactgttttctctaaagttgatttgcgtagtggttaccaccagattcgtatgaagttgggagatgaatggaaaacaacatttaaaacaaagtttgggttatatgagtggttaacgatgcattttggtttaactaatgcacctagcactttcatgaggttgatgaatgaggttttgcgtcctttcattggaaaatttatggtggtctatactttgatgatattctaatttatagcaaatctttagatgaccatcttgatcatttacgtgatgtttttaatgctttgcatgatgcacgtttgtttggtaaccttgagaagtgcagtttttgcaccaatcgagtctcgtttcttggttatgttgttactccacaggggattgaggttgaggcaattcagagttggccgactcctaaaacggtctcacaggtgcggagctttctaggactcgcagggttttatcaccattttgtgtgggatttcagtaccattgctgcaccattgaatgagcttacaaagaagagagtgcctttcacttggggcacatcacaagagaacgccttccacatgttgaaagataagttgacgcatgcacctctcctccaacttcctgattttaataagactttttgaacttgaatgtgatgctagtgggatttggattgggtggtgttttgctacaagaaggaaaacctgttgcatattttagtgaaaaattgagtgggtctgttctgaattattctacttatgataatgaattgtatactcttgtgcaaactttgaaaacacaacagcattatttgtggcccaaggaatttgccatgcattctgatcatgaatctttgaagcatatttgtagtcaaggaaaactgaactgtagacatgctaaatgggttgaatttattgaatcttttcctttgttatcaagcacaagaaaggaaggaaaatatcattgctgatgcattgtctagtagagatatactttttttgacacaacttgactaaaaaatttttgggctagaaacagttaaagaccaatatatgcatgatgctgattttaaagatgtgttgctatattgtaaggatggaaagacagggacaaatttgtcttcaatgatgggtttgtttttagagctaacaagctatgcattctagctagctctgttcgcttattgttgttgcaggaagcccatggaggtggtttgatggggcattttggtgccaacaggacggaggacatccttgctggttatttcttttgccctaagatgagaaaaaacgtggagagattcgttgctcgctgcactacatgtcaaaaaagctaagtcacgtttaaatccacatggtttgtatatgcctctccctgttcctagtgttcattgggaagatatttcaatggattttgtgttgggattgcctaggaccaagagggggcgtgatagcatttttgtggttgtggatagattttctaaaatggcacacttcataccatgtcataagactaatgatgctacccatattacatatttgttcttttgagaaattgttcgcttgcatcgtgtgccaaacacaattgtttctgatcgtgacactaaatttcatagccatttttggagaactttgtgggctaaattggggactaagcttttgttttctactacttgtcatccccaaacgatgcatataaaggtgtgtgaagcatctaggcccccggtgttaattttggtaattaatgacaagcgctaattgtggactaaccgttcttttgagctatatctttaagttaggttcacattatgtgtgcgcatggatgtctacctatggattaaaattgacggcacaaagctaaaggaagagaagacagtaaactagtgttttcttttctaaattgatcgaggcgttgggcgatcaaaattgtgctagtttatttatagttttgccgaactattaagagggttaatgacctagcaaagagatgattttaattgccacattaggtcattatgcatttagacttgtgctctcatttcatcacacacacacacaaacttttatctcactgttttcggcctgaccagggccggtctgaccgcggctcaagtgccagtctgactggccagggcagccggtctgaccgcagggtctaggccggtctgaccgccacctcaaggccggtctgaccggcgggtgcgggccggtctgaccggccggccatatggctaggatggtgccgtctcggtgtgccgatcccgagccgccagagccgtattcggttagaccgagctgatggtggtctgactgagccgaggccggtctgatcggccaccccatgttggtctgaccggccacggctgtggggcccaatgacagcaactagccgttgtagagtagcacggtctgaccggccacatacctccggtcagaccggcagagcactgagttgggggatttcgcccccaacggcgagtataaatactcccccaccagcagcaaggggactctcttggcacccaattcaattgcatacaccccttgcacctctctcacacatctttgagcttagtgttcatccattatagtggttgaggttgttctagccaagtgtcaagtgcatttgcttccattgtagagctagtgtggcacttgattgatcatctccacgccggttcattgcttgttactcttggaggttgccgcctcctagacggcttgtggaggagttacccggtgacctctccgagaagattgtggaggaggcccggcgctggtttgtgagtggtttggagttcactaccttcggagtgaaggaagaactaccccgagtgatcgaggcttgggtagtcctctccgtgggccggctccggccttgcccaccccttgacgaagggggtgtgcggtggcttcgtggttgagcggtggagttgggctcgcctcaacggggagtaggaaaccggcgagtttccgaacctcggtgaaaaatctcttgtctcattgtctcttttgattgtcggatttacatttgtgcaatttacatttctagagacatacttgagatcatatcaccctaggattgctaaacattgacataggagtgtgatttactttcctagtgatatacttgagccactttcaccctaggattgcaaaacataacttagttgcttacttagtcgtgtccctcaccgagcctagcaacttaggttagttttgattaggtgtcatttaatttttaatcgcctattcaccctcctctagtcgacatctcgatcctacagtctgtgttgagagtccaattcttgttatgagtccaattataacaagtagtaaaccgttcataacaagtagtaaactcttatgagtcaaattcttgtatagatagaattctcctcctctttggtctaagtttcctcccaactttggcggtttattacctacattcaaatatacaccaacactgttggaaaatgtcagaattaaaccctaccactacgttggatgttttataatctatgttttatgcatgtattggtggtataaaattggcatttaacagccgccaacaccttcttagtaagctcattcaatggcgcaacaatggtgctgaaatccttcacaaagcaatggtaagatctagcaaggcctaaaaaaacttcgcacttgtgtgatagttattggaacagggcattcttgtatggcttccaccttggcttgatcaacctcaatcccctgcaaagtgacaacatagacaagcaaagaaactcgatctgtgcaaaaggtgcacttctcaaggttaccaaataaacgtgcatcacgaagagtattaaaaacatcacgtaaatgatgaagatgttcacccatagacttgttgtaaatcaataaatcatcaaagtataccaccacaaatttcccaatgaaagcacgcaaaacctcatttgttaatcttatgaaagtactaggtgcattagttaacccaaaaggcatgactaaccactcatatcacctgaacttggttttgaaagcagttttccattcatcccctagtttcatgtgaatttggtggcatcgactacgcaaatcaactttcgaaaacacaatagcatcgaatacaggtattttctttcggatatgtatcgagttagggagggtggtatccgatggatatggattatccggtaaaatatgtggatattacccggttaaatatccggatattacctggataacatgctacttcccagccagccaccaggcccaaatggcccacgagccaccagccaggcagcctaacccaagcatgcacagaacacataggtagcatagccacacagctccgctgccgctacgcaccgttgtcgccatgccgctgccgcgtccattgaagctccacaacgctcgtgacgtcgatcctccgtcgcctgcacgccccgtcgagtctccgccattgccactgcacccgtcggttcaccacaccccaatgcacccgcagtcggaagtccgctggaaaccgtcgtgactcatgagctcgttgcgctgcatacccctcgtctccaccccccccccccccacttcattggttagcagccagacaactactagtcacttcacacaggacagttaaagacggatgccgatgattcatttccctttctcaatatcacattagaagctcgttgattgtaagatactaatggcctaatatagtcacgttatgaatatatagggatatatagggatgtttttttgactagatatccaaataaacattcgtaaccgatagcgtatatatgttttggtacaaatccatttcatatttgtgccagatattatccgagtttgtatccgtattcgacactattcgtatttgacccgattccgattgcaaaatgtgggttaggatacgggaagggtgagatccgacccaacctgacccgatttcacccctacatgcttgcataggcacaacatcacattcaacaacatcatggtaatttccaattgcaaaattaacgcgcaccagttttgttacctttgccttaccactgttgttcaaccattggatgtactatggatgtgggtgaggtttggtgctatgtgcaagcttctccaccatctcgctgctagcaattgtggcagttacctccatcaatgatcatgcagcaagaacgctctttgatgacgtacattgtttggacaatgtgtgtcagtgattttgctccgccttctccatttgtgcactgaggacacgctgcacaatgaggttctcatagtgctctgcatcattagccctaatatgctcttctggcggctcctcattatttgcatggtcagctgcaagcaaagcaagtgtatcctcatcgaaatcactagtagacaaatattcaccatcatttttgactaccaaaacatgcttgctagggtagtcacgctgcatgtgcccaaagcccttgcaatggtgacactgaacatctcttgttttacccgtggatgcaattgaagaagcactcgcggctagctaaacagcctttgtcgttgaacttgcaggagggccacgtggcttgttactggatggaggaggtgctgctcgactgggtgtgggtgtggaagatgaggaaggagtacggccggccggagaagtggtgcctgcctatcataatgtagatttacctgcacttccctttcagctttacaagcaagatgaaacaatcgagtcatattagtgtaatctttgtagtctacgatgtcataaatctcaccatttaaaccacccaaaaatctagccatagcagcgtcctcagtttcctctaaattacaacgaagcatgcccatttgtaattcctgataatattcccctatacttttcacaccctgtctcaattgttgcaacctattcaacaaatcacacgcaaagtaaggagcagatcatgcccgcatgacccgtttaaaagcatcccaagtttgtggcatgttattaggatttttcttgccatgttctattcaccaaaccgaagaaaaatcagtgaactaactagtaactttagaattctcaggaaaatcatgccatgcaaatttttggtcaacaacaatctcccaagaaaggtacgcatcgggatcatattttccatcaataggaggtatcttaaatttaattttagaaaaaaaaacatcatcattattgcgtaccttgcgttggcggtgaccacccatacctctatgattattgcgtagttgtcaacgatcaagagcatctcgatcatcttgtttagtgtcagcgtatattcatcctcaatgccgtcttcattacgtcgaccattacctctagcattgagatcatcaaaatgcctcacaagagcagcaaggctagtgttaatgcaagcgatcgatgtctccaaccctgtaagcttgatgttggtggcgatctgtgtggactccaattgtccattcttctcatttgtcacctgcaaatcagcatcaagtccttctttgtgctacttaacttgccttgtaaaatattttatgatgcctttggtgcgtggggaatgaaacgcaccctcctcatcattatcctctgaacatgccatggctaataaaacaaaggcaacaaaaacaacaaatgaggaaatataagccctacaactattgggatgtagcttttgcaagatgctcactctcagcctatcttacaagcccttaccaattcttaccttactcataggaggggacgtcaacccacaagtctgcaaccgtggaacgaggtgtatcggtgccgtagcaacaagacctatcaagttgtagtcaggtttgtggttgagttgtcaatgggctgaaagtaatgctcaagagaaaactagcaaccaagttagccaaatcaagttgaataatataatcgttcaaggtttgtacagtgctggtcacaggcccggtcctgtcaattcagtggcctggagcgaagctagaaaaatgggccctttaatacaactataataatataactatgtttctaataaatttaatgcataaaaaaacattcttataaaacaagttatatatcttaccttaaaattttcttctaacatgtaccgatgcgaagtcatcgacgatggcatcaatatcaatttcatctaatagtttcttctcgatgcataaagttgccaaaccatttaatctttcttgagacattacatgatttcactgtaaatttagaaaaaagtaagtaatttatgaaaattatgtcatactagattcaattcaacattataataaaaatgagtgctggcaaattacctagttgagaactaaagaaaataactattcactgccctagttgcacagctgcaccgcgactccgcgaggatccctaaatcctaaatcaaaatttcagaaatcagaagaggagcaattggggagtaacattttgcatcccaaaatttaaacatataaacttagcatacatcaaaggggagagcaatggggtacctcctggtctcctagaactgaacagagagtcagagagataagagatttgcatctggctaccggctgtcgtggtgccgctgacggcactgagcacgacaccggccgttgacgcatagccgcgcgcagtcgtcgacgtagctgaaacatggctggaacctgggagggtggcgaacagccgaacatgcgaagagtcaggcgattgcgagcgaaggcgaagcgatcggacggaatcacggaaggaagccaaatcgacgcaatttttttcctgtacatttgcttcttcctctcctgagctagtgggcttcttagttcctatgggctattatgtacagcatatatggggttgggccccttcacttcgtgggccctgtgtggaggcccagctcgacccccccgggccgggcctgactggtcctaggctagccgaagtagagacgtgagcctaaccacaaagaacatcacaagacacaaacctaaacaggaacgatgacagtggtgacaacaggaaatggcggaaggtgctgaggagagagatggaacttttatttttatttttttgatattttttcacagttaggagcacattggaaccaaccacataaattcttagctcaaacggacaaaatatgaagcatgtaaatttttttcaaagttctatctaaaggttttgcaaagcttctcgcctcaaaaacataattttgcaagtggaatttcgcgattttaattttgtcgagtgtggaatttggcgatgtaatttttttaggtagatgtccgtggatatattatgccaaatttcgagtccatatgaaaaagatacgactattttaagggagatcactcgaatcagggttctatttcctttaaggtagatcactcgaatcagggttctgtttcctttctggtggcagcaggctcaacgacaattaaactcaataaaaggaacatatcaaacacaaacagaaaggaatttggtggatggctgtgatggtgctgatgacgacaaaagtggtgatggcggcggtgatgaagatggcgatgtgcgtggtaagaacaagaaactctaatagactaagtgctaagaccaacaagttgacacaaccgatgcaatcgaaaactcaacaagccctaactaatctaattttttttggctttttctagactataggaaaaaaaataaacaacggagggtaaataatctctcactgatcaaccacgctctgataccacctgttgtgaacccgcgagggatttgtatcccaatctttcaataagaggcggagataactcgattggatgaagacgacgtttatggcccaactataaccgtccaaggacgttgcgccttagcaaccgatataccgtcaccaatggtcgtcacgaacttgtggtgcacgacaacccgacctagagggcactcgtatgccctgcaagcaatcgaagaacaagtagaactgctagatgaatatgaaagtttcactaggaaatcacaatatggcagggttccgaatagaagcagacgggcggtttcgccaacacgcgcgctgcaagcaggtagcaagttgctaactctgatcatcaaaaaccaattgttcttggcagtggctataaaggtataagaagagggggagaacaaccacatgggtgttggggttgtgctctaatcataggacgcgtccttaatggacccaacttgatacatagcctattgggcccaaataagttgacgcaatacctttgatagaaaaaggctcggtgataaagcgatgattgcggccactccagaattgatatggacatgaggccagatccatttcaaagtagacttgataagctttccatgaagtacttgcacgcccaaatcggagttcgtaggaagtcgtggcggtcgtcacaagttggagttgtcctgtagtttgaatccagcccgcgcgaatcctctcccttttgatcctctctatcattcctaagtaaaacaagagtgcacatgtctctgggggtataaataagatgaacatgaactcaagaatgaactcacctgatagttgagttgacgtgcacaagcgcaggtaatgttgatattgacgtgcacaagcgcaggtaatgttgatatttcttaacgacattactaggaaattaatcccaagcaatgttgccagagatattagacggtattcttatgggttatagaataaatcctcacggatataccactgtagcatttcaactggaaatatttccaagtatcgtatttatttaattccaagaaaagatatggtaagagagtactatgctataaattcatattacacttatataaaatcaaagtcttttgcaggagttaatcattttaggataaggataggttgacacacagaaggatcagtttagaatactcttgataattgataagtctaggctaagtggataaaaaaaaagaaaaatatcatttatgcacttctagtatatagtcattttagtatacatttgctattgtacaactttatggctaataccccctaactatgtcctcctaatatattgagaaaccaccccatattgccgaattccttactacaatccgtcatggctatccaaccggttaaagatatggaggagtacctgcaccaagaaccttcttagccctatatacgacgtggaggaatacccgtgctgagctatcaccatcagcggcctacctctacagatctgtggcatataacaccacttaataatatctaataatctaagcaccacacttacattactaaatattactctacacctctgcagatgacatagagcaaccatatgaatgaacactaagccaataccattgcatatctttggtaagctagccacatatttaatacgagtcaagtataaaccaaatttggtactcgaataattatacaagtatagtaaaggaccaaaactatataaagaaaaatatttcattaatggataaaatcttacaagagagggaagagatagtagaaccatacccgaattctccagaagacttgaagaactaaggaagactattctaattctgactctactagcactagagcaaaatatgtaaactaaaaagcttcttcacttgattccttgttggtgtgtgttggaatgaaggagatgaggtccttttatagcttgagaatgacggttggaggtgccaaaacaggtacaaccgtcattggaaggtcagtagtaaccgtcgttggcttgggcctaggccagcggagccaagcctgggtcggccgacgcctggcaggcctccctgggccagtccttccttctgaacgtctcctgatggatcctgggcccagtggtatggtggttggtcccatttgcaagtgtttcaataggtttgtgggcccatctatccatatgtctaccgcatgtcgacctctgattggtgattttccatcatttcttcttaatttatgaagtgatctcctgtatacaagtactttgtcaagtactagtggaaataggttatttctaaatgaatatgcatgcaagcatttctagttctccattatttccaacagtattgatggtcgaaattcgtctataatgaccgtcaacaggtaataggaccatgaggttgtagtcgtggagacgtggatgtatcgatggtgttgatgtcctcatcatgagagctcatggagctggagtcgccaccgggccgtcacacgagatccgccaccggggatgccgctcgagatccaccaccggtcggcagcgtagagatccaccactggggccgcctctcgaagcgaggaggaggatgactgtcacatcctgattttcgttttaggatttataaattatttaataaattattattagaatttatattaaatgttcattaatttacaagagaagttaaatgtgggaaataaaatttcctaaatataaagcatggacggatttattttttattaaattctccatggttaattatactctctggaattttctcggatttttcggagctcaattcctaattttaaccatacaaagaacatttcagtaattatccacatattaaattaatcattaaatggtctgattataattttgttaagtactttgagtgtccaagtattttcaggatttttcttgaaactatttgagcattggaagtatttttaacaattcaaagatcatttcagtgattattttaattggaaaaagtttttaaatcctctcctaagccgttgggctgatttcagcccaacatctctctccctcgcgcgcgtgctgtgcagcccaagtcggcccatccgagctcctcctctttctttctttgctttgttttcagccagcccaagacgaaaagtctaattctcctccctgctacagtgtcgtcttcaagcttggacagaagcccgagctgccgtcctgtgctctagccgacgccgcttcctccaccaaatccgccgcatcccgtgctccgtttgcaaaattagttgaggggaaatattcctcttatcctcctctatcctttcccccaagaatcggactttatcacgaagaaatcaacgcggaatcgaattcgttttcgagtttatctctccaactaaccctcggattttccggcttcgattcctctcggttggagtccgatctcttcaatccaagcctataaatagcatcccctagtcgtcctctttcgtttgccccatgtcccgagctctctcgtgccccgtagtgccgccgccgcgccacccaaaccgccgccgtcgccggccggcgaacagccgcctcgcgccgtcgttttagccgccgccgccgcctcctcacgtcgccgtcgggtgcgcgtggaagaggggaagctcggccgccccttcgccgtcaccaccggtcaccggagagccgccgccgccgcacaagctcgtcgccggtcgtcgttcgtcgcattggttagtaccggtgagatcgcgttgttctcctctacgcgtaggtaccctccaaaagtccggccgagtcttctagcgccggcgaggtcgtcgctgatgtcgagtcgacattgatgatgtcagcgatgacgtcattaatcccttttcttagttttctctattagatgaaaatcgattaaacttcggaaattaataactaaatcatcgtacctcggattcgagtggttcaagttgctaaatttttctaaaatcaagatctacatgttaaaaatatccacatgtactggttatgcttgtttttgtactattttgttgattttgttctttcgttttagtttccgacgttccggaggagagcgttttcgttgaggaaggttcggaagtgtttgcggaagctcaaggcaagtcacaaagatcccaaacaaccctttgagcatgttgaacccgtttaaagctattgtttgatttcaacttatgcattattttcgaatgtcatcgggtggtgagcctttcacaattaattaatggccgaagatggctttattttcctatgggttataatttgattagctagaaccttatatattggtttgggttcagctaaatgctatatatatataattgcttagccatgcttagaaacattagcacatgattgggataactaatgttacactatcacttatggttatatttaatggtagctcacgatggtcaatcgtgattggttaattaattattgccaattaaaatttgtcaatggtgggttgtgagcacatggttgtgaaggtcgtgctcatggcaattaaggaccgattcgcgagctactgttgtaaaacattaaccgtgccaaccacaagccagcataggcaacggctttaccttttgtatagcatgattcattgcggggcaccagactgagaagcggcgagaagtccgtgggggtcgctggggagtccatgcctctggttgtatttatagagggggtgattatgatccaggtatggtgcactgtggtgagttgtgttgtgcagagggtattgtcatagcctctattcgggtactttccagtatcgcgacgcatggtagacatgatgttgaggctgtgtcttgtaggtacagtggtacacctctggccagagtaaaactattcgaatagccgtgcccgcggttatgggcgagttgagcaatgtttttcgtgattagtctcacacatctcacaataattattgatgctataattggtaataatttgcttagctcctggtttggagttagatttgtacagccggggttggttgttcaggtttggttgggcctgtacagcattggggtgctgttcagtgttgattaaaattgatgattaattactctattgttttactactcttaaatctttgctaaatgctgcttttacaaatgagcctatattatgccatcctttggtatccttgtgcacttgcatatttgctgtgtggcttgttgagtatgtcatatgcttattcttgcaataatcaatcaacctcaattgaagaaaagggatccagaaggagaagacgtttggcttataccccagttgagctgcctgtgggaatggagctgaagtcatcgctagaccgttatttccgctgctgttttcttttcttttgtaagtatgtaacgttattattatgatggatttgtatattaaattgtcagtttgtgtacctcggctgattcctggacgagggttttatgcacaaataagttcggaaattactagtgaatttccggacgtggcaacgaccacgagtgggcctgccgctgctctactcgccgcttgccagagatgagcccgaggatgccgtcgatgctccacgtcgcgatggccccgacgttgctccacttggtgcttgccggagacgagactgccccgcccacactgtcggccttgatccacgtaggagaaagccaaccttgttttgcgccgtcggagttcaattcgctgatgccggagttcggtcccgccgccgaagctccaccgccaccgagcttggttgcatcattggaacttgatttgccgctggaggggaggggatggatggggaacgggagagggtagacggagatgggtggcgccgacggagatggagaggagagtaggcgatgaagctgggggcgatgttggtgaggcggcgaagatggagaggcgtcggcgtcttcgttgggacttgggaggggatgaggattaaatgcaattgggagcgagagaacggggtgagggggaggaaaaagtaagggatggctgacaagtgggtcagtgggcaggcatgattatgtgtgtagatcttttttttttgttgcagggtctgaaatataaaaaattggatggtttgttaatacaaaatataggaagggctgacatagaagaatttaagggctgagatgaaaaaaagttgttaggtggagcctccattgtggagctagtgtccatataggaacctcatcctatgtggcatagcgaggcatgattttgagtagattgtactgctattgtccttagggaatccacaatgtgagccacttctagagtgctgtagaggaactcagctcggaatggaggatacccctggatgggctcctcaaaatctgaaacaacttaatagagacactccaacccacaataggtatcacagcctacaaagccccatatttatttttactatcctacccctaatctctctctctcttgccccctcctttttttcgccaccgcactcgcctctccctctcgccgccgcctccaactcaggcccagcgcaccgctgcggtggccgacggcaagcggcgagaggcgggtggcatcctccctggccttctccgtcacgccatcgtcgccacccaccccagctctctctctctccggtggcggccgcaagggcgacgagtaggaccaccctcgccgccggagctttgtcgacgagggcgacgaggagagccgcctactccgccgcgaacccgttgcctccgccggggatccgccgttgccgccgctcgccgcgcgctctctctctctcgtcgctgctatttccggccgtagctcgagatcccgccgctccctctgccgatggctaagacgagcccggcagacggctgccgcacggtggccgactccgcccaccgcctctctctctcccgctagcagaggctgaggagacggcgcacctcggcggtgcccgaggaggagctcggctcagcggggtaggccgtctcgcgatgagaacggaggagaggagagagagggggagaggggtggaaggggaatatggtggtggagagacagtcgcctgaggcgtctgtcgccgcagcgcgtgcctctagcccgttccctagccgaaaaggaggaggcgcgtctcccaagcaggggtcgcgcgccatcaccagggcatggctcgaacggaaaagcgaacggccgtcgctggggcgggttgaagacacattgtagatggccttattcacccagtgaatagctaggagtaatttagaattatatatttgagaccaaaatatgatagcagaattagcggcgaggtccgaccttggaagtgagctgtttacacggtacagaccagtgacaccggatagtaggggaggcagtttgagacgttggatgcatttcaagggtggattttggggcactggacgcaagtcaatagtatccgagtgcagtacggcgtaggtggcctccgagtcgtcgcgcccggcctagggaaattgatctcccccgcatccccgtcccctcggcctcgactgcccacccgccgcctgcgccgatctccatctcgcgagggcgagtagcagcctgctgcttctgccgcatcctcgcaggccggtgagcaccctgctcgcgtcatcctctttttaatcccttatcttctctcctagatctggaagcttttctctccgccttagttccacaaacaatagatttgggggttcaactgaaccccatcatgcccccggttaggtcaaagattctgtctttggcgaattgggaggtgaattcatgggtgagccgacgagcttcgtcgtgatttcctattcaatttggggatcttctcgctgtttgacgtattggccgtatggcatatgcagaagtcgatgtgaattcattgcttctccaccttttacaacgatatcttgtgggctagattttttgtcgggctgggactagcttgtgtgtattcttgattttgtcttcaaagatgttatcctaaaggggtggacaaactgctttgcttttgtcgagaaatttggtcagtttattaactgggagttggttgaaattacacccaaagtctgccaacttttagtgagcgcagtttgtagaatctattatttacttggtcaagaagattgtgcctatacataaatagttactgctagttgagaaatcttttctacattcagttaagcttggatttggatgagatattacaatcttctgccaacaaaagacatagttttcagcatgttgtttttgttgtaaccagaatttctatactgtgaagattgtatgtacaacagaaaatttctcttatgccgcaaagctgcatgccatactcttatttgccacatgatttgttggctttgtaaaaatgccacaaagttcagttgtatactcgtttatctgccacactttaccattttaacccaccaaatgtgcaattttcccttcttctgcaccctctttctctcttctatgagtttgtgaatggagcttggccgcacgggctggtgcccactgtgtttggcccaacagaaaattatatcttaaaaatgtatgtctctctatgggcttttacacccaggcctaggacctaggtccgccactgcggccgggagcagggcgcgtggaactggctttcaggaggaaagccgtgcgcggagtaggtgggctgcacagagccagttgctgagggcaggacgcatattgttgtgctgctggcggccagaggcggaggtaatgctaaggttgaagctggctactggagctagggtgtcatagctcatgccgagctcaggtgcacggagatggcgtgcgcgttggacatgcaggagtggggcgtcggacgtgcaggagtgggctggctgccaggtctggctcaaactttggccggacagagctaggtctgtccttgctggacacagagaagaagggtggggataggacaaaaatggagaaggagaagaaggtgggcattaatttggaatttcacactgtattgtggtaaaagaatgaattggtactcaattttgtggcattttagtaaaggcttcaaacttttgttcaaaatgagagttttcgcatccaactttgtggcataagagcattattctctttgtataatggaataccgttaacttgtctcaggtgcaattgttattaagcagaacccaagggccgtgtaccacatccttgaaattgtgtattgtctgcttctaaccggaaaggcaatacatgcgaaaactttcaatgggtaatgtgtagttgcacattgatatatgggaaaaacatgcagtggatattaaacatgggaaaactatcgcataaatttctaaaatatctcacatacaggaaggttatattagacaaccatataaaatttcaggacatatgaaattgataaacagtgaggaaaaaaagagtattctttatttgtgtttttttctttgctatttgtaaacttaatatctcacaaacaaagttgagttttatcttgaattttgtatgcccatctaatttcatatagctatcattgagttctttttttcaaataaaactctttttgagaacttatattctgtggtttacatgtttccgacctagttaaacatttcaccatgtatttacactggatatctcggaaatctcacatcgtactcctatatccacattgtctcatgtatagttgtcgatagatcccatccatacaatgctccacattgcatggcaacagatcagaatgtctgatgtttgcacttcagagaacacaaacaacaatttaattggcacataagagggcacaaacaacaatgaactgaaatgaacagacaaatcagtaattgcaagatgtttgcatagaaatcttgaaatgcaactgataagtgattatggttacaaattggaccatgcaagtaggctttagaatttctaagctctgctcagtgctattttccttttattagtgcattgaggcggatcaaactcatctacatttttggtaaggttttggaatttagactttggaattcaaactcatcagcacacattgatttcctctggagtatagacgcttcaatgccggatatcgtcttccattaggagtacatgttcaaaagattcaatctcgtggaattcacatgtctgtacaggttctgaacaaaagagttttaaatggaaggaaatgtaatgaatataactgcacacagcattttgatgaatataaatcagtatccgtgactcttgattagttatggataaaattgaaataggtcatcttatggatttcttttaaagtaaaatcatcagatgattagcattttaatgatgatgacatggcttaatatgatggctcatgttatactcaaaaatataggggagagattttctgggatggaatacattagtatcttgttataccatgtatgttaatttgattaaaaaatatcatcttcatcaatataatttattttcctttgtggctatgagaaacttttttaacatttctgttaatttcgttctctgccaattgagggaaagggaggtaaaaatgttcacagtagcatggtgaatgcaactgtagcaagctatcaaaggaatagatcatgtaaaacatgcacaatttagctataatctgtacatattggcttaaatttacattcataatgttcgttgctcagtatgtggattcatattgtagatatttttattatatacataaatttcatggttctgcaggctgttcagcacaagcaattcggaagttctgtctgaaactacactgaagattttggagggtccttaagcaggttttttcaaacatactgatggatggggaatcccagacgagtaaattatcatgtgagcacatgtactcttggtacttcaccagggaagaactggagaaattttccccatctaggaaagatggtattactgagataatggagtcagaaattcggcagttgtactgttcattcattcgggatgttggcattagactgaaactgtatgtgccaatttccttgttgagtgtaccttttaatgtcagtatagctcacttttcaaacttatatgttggttttacggctagtttgtgcccttagttagcacacaataatttcttttattctggaagtttgctaagcttgttacctattttaacatttttctttcagaccacagatgactatagcaacagcaataatgttctgccatcgcttctatctgtaccagtcccttgccaaaaacggatggcaggtaaggagcttttttttttaatttatctcttttgttgtggtgggttggtgtcttttagaaaaagcatttttctgaaagaatgttttagaaaagcaattggatacaatcttctctttaaaaaatatttactggcaaaggttctcaaggaacatatataacccttgcatattttttatacttgatcagttcatatactctttgcaacttgtgcttaactttccgatctattatcggttgtacaataaatatgaagctgcataataacactaacatttaatcttgtattgcttattaagtgcatggcgatgttacagtgccattaggtgatttagaaattcaattccaaagggatctacttgtgccaatcagtaatcctatattgtaattccttacttttttactgtgctgtaaagttttgatatagtctgatttatggttgatttgcttgggatgtttggaagatacaatagtattgagatgtattgtacaatacaatagaacatcctttttgaggacaagtctgttcagcattcctgttgaagttacactattgccattagccaacaggaatacagcttacaatcctgttattagaagctaaaatactataactgaccatctaataagtataaatcctccagtaagttttatagatttgattcgcctcaccacattcactgtattcctgtcatgcggttatttaattgagaaacacattcttgtctctgcaattaatctggagttgtgctcgttatctgcacttgcagatgttacttgctgacatgtttcttcattgctcaagaaaagaaaaaaaaagctgtgcatgtgatgcaagctgtctataactaaatactattacaagtaattggtgtttattttatttgcttattgtcattccagagccaatagctttacttgttttttattgcagacgattgcaacagtgtgcatatttctggcttcaaaagttgaagatacaccttgtcctctggaccaagtaattagagtggcctatggaacaatgtacaggagggacccagctacagctcgaagaatccaccagaaggtatagttggatcattaattgagttttcagtatatatgtaccatccagttaatggttgacaagtagtatctatcaacaggatgtatttgagaagcagaaagcactaattttgaccggggagagattagtccttacaactgttcggtttgatttcaacatccaacatccttacagaccactacttgatgctatggaaaaacttgggatctctcagaaggaagtgaaacaagtagcttggaactttgtaaatgattggtatgagatgtgacatatcactttgtgacattattgttttgatgcttcattcattcaactgatcaatctggatgtattcattctgttgctcgtaggcttaaaacaacactgtgcctacagtataagccccaatacatagctgctggttcgctctacctggctgctaagtttcagaacgtcaagcttcctgtgcatggagggcatgtttggtggcaccaatttgatgttgccccaaaacctttggaaggtatgtagactactaagctgaaacataatagtaccttgtgtattcttggtatttacagtaagagactaagagttacactgctatagctgtccttcagcaaatgagggagatggttcacatgaaagcaaagctgtttgctcatcccagtccggctaagcaaaaggaagttctttttgaaggaatgctgctcatatcaaatagcccagattctgtgttgactcaatctagcttgtcagtaagcagctcgagtcctgaaattggagaccccaatgaccacctgcaggtggattcaagtcaagacatagtgcatattgaggatcgtagcaagtcatatcctgaaaggaatttatcgaatcttactgctgatatgaataatcccggtaaaacacacaataaagaaagcttggatcaggccttaaaaatcaaacatggtggactgatctcatgtaatcagcagataccattagatgcaattgcaaagattgatagcagcactgctaaatgcgtggaacagaatattggcatttgttgcagctcaagtaacacattcaatggcaaaatcttgaacccgttctcaataagtcagcgaagtggtgataaaacaaagttatgctcagagggtggatcatcgcttacagatgtggacagcaaaagcactcaatctgtcgaaccgcccactacaatttgtaaccataccagtgacagtctcaatgtggacagtttgtgctctgatcagagactggctaattccactgcaggtaccacggagaaggcatcatttgtattgcctgtccagataaaggttgatcatttgtgtgtggagcgtaaaaaggtagatgtggcacggataaaggatttgttgatgaagaggaagagacgaagagaaagacaagggcggtgcattccttcagttgacctaagtgaagaagcctggattgagagagaacttgagtctggtatagtttttaaaaaagttgaccatgttgttgcatcgtatgatttaagtgatgaaggctggattgagagagaactggaatctggaattgttattggacaaaaaaatgaccagcctgtatctttagatggtttgactgaagatgattggattgagagagagcttgagtctgggattatagttgaaccaggaccagctggtaagaagctaaagtcaaagcttctttcagagggtcatgagataatgaatagcaggtgggaaataaatggcaaatcaatgcaaaatcaagtcacatagaatatgagatatccatacagataggagcaccattgtttactcgtgttctttatttgattgaattaactatacacctcgtgtacttgaaatgctaggggtgtgcatgggaaagatttttgttctttgtataactagtaacagtgggaattcacaatttcaatctttaggttgtaggtgcaactgtacaataattaagtgtaaatgtacaatccgtccttgttagcagctaatccttcattgtaaactgtacctgtcatcaaaacgaaaataatgttctggtgtaccgggaagctttttttttttttttttaaatctgcaacgacgatttcttattactgaaattcagtgagatcacgaatcaccaggaaccttacaaattctgggatggggtcaacccaaacaaacgattgacccgggttccaactcacccaaatgagcaagttcgtgagcaactttattacaagaacgaggcgcaaaagagacctcaaagctagcaaactgaaactggagaagcgtttttatttccgtgaagattgtagcaccagtggctaggtcatgcgatgaggacttaatcgccaaagccagtatggccgagtcagtctcaatttccacagcagatacaccttggaccgagatggttaacagagctaccaagcatgcccttgcttcagcagaaatagcatcattgacgaattcgatgcgcccagcacccgcaaacaaaagcatgaccctcatcgttgcgcaaaacaaaaccccatccatctgttttgcgatccgcttgaaatgcaccatcaatattaagtttgtaaactcaagctaaacgtatgctataactttgttggagtagaagttggccacattaatgaatcaatcagaaagctacagttttgttgtttccattattaaactgtggggttcgtaagcctgatggctgtgctatgttcagctcatggaatagcattccttgtgcccgttgaacaactagatgttgtggagcgcctagggttgctaataccttttgtttgattatctttttatatcttttgtccgatcatatgtttataccttttatcctactatgtagtaatcataaatacatgtttatgtgctatatgtagaatgcaggacattgaacacacttcatatatatttcatatatagatatatcttggtttccgtaaggaactagaaactaaccacggctttgccgcgcattagtatatataggctagctcaattggatggacccaatgcactgttaattatgaagtcaggtaaataagaattgatcataactaaatatgtatatccaaaacaaaaaaaagggctacataatcacaaaattttacattcaacttacccgataatctagttttacataccatcaaactaagttgcttttgttactgacaatgagagatcaactttgtttctccttataaaaagaatatgaggttcatatcaaataggtaaaatttgcaacaggacatctgaaaaacgtgtaattagctaggggacatcgtaagaacgtgtatttgctgtagggcatcgtaaaaaactggtaattagccgctggacactggtgggattattttattatttttggaggaataggagagagaaacaatcattaaagactagtttacccttggctcaagttaatccaacgtgggccgctaaacattttctttagttagtcttcactaatcacgggcttaaacacatcttacattctcatcaccaagcaaagagcaagagaggagaagaaacgatggtggatgtgaagcacacggtctcatttttacaggatcaaactctcactctcacaatctctgaaccttttgtcgaatatatgaatagttaactgaagaacagagtagaacgagcagagttttggcacagcgaagtaccctgctgcttttctggtttcctaattattctcctcaattacagagtttgttacatgcataacagaaaaaacacccgattgatctggatccactactgaccgtgccatcccacgatccaattcagtccaaccgaaaaactagctagaaaacagctacatgctaactggaagtaaaacggctgctgacagattctaacacagccaaccatatgcaatgcaactacagaaactagatgcacaagattgcattatttagctaacatcgcaggccgccgctgactgctcgttcggcaccgcgttcgcgccaatggtcgccgtcggctactgatgagtggctgagcgcgttcatgtctacatcaccgtgctgggcatgaaggacatgaagccatggagcagtagcaccggcgacagtgggcgagcgaaggaggagcggcaacggcaggcgagcctgggaggagcagcgacagcaagcgagcgcggtgggcggagcagcgacagtgggcgagcataggaggagcggcggcggccgcgggcgaggttgaaggcgacggttgagagcagagagagagagagagagagagagagaacgagagagggagaaaaggataaggaagaaaaaagaaaaagaaaaaaaaatcaaagggtagatctgtacttacacagctgtttctctctccaattcttccggatataataaaataatcccgagggtgtccagtagctaattaccagttttttacggtgccctatagcaaaaacgcgttcttgcggtgtctcttagctaattacacgtttttttggatgtcctatagcaaattttgcctgtcaaatatgttttccttacaaagatattgtatgatcaatactttcagattagcatcaatgatgaaataaggagatttaactatttgtaatgaatagaaagtaagacaatattttcagtgaggataataatataacttatcaccgaatccaccgtcttgtgatatctcatttaccacagccttgtttggcatgagcattgctctctcactgaattgtacagtggttaaagtcccagttctgcacctgcatttctcagtcccagcactctatgtcaacttaagaaaatgtaaataaggtcatgaacagaaaaaacatgtgttctgaagaaacggaacataacaatgtagctccttgaatttgagctatggtagactttaattcagattttaatatctaaaggataaggcagtgactcggttatcagaatataacatgaaacaaataattttgagagagcataatacaagtatatgtgatctaaaagaaatgcagcttgttatcaagacaaagttctttgtgactatagggtagcccaagcagaagttctggttgtgatcttcgttcatgcagaggtgaaaatggaaagcaaagaaactctagttttaaaagcaaaatagaaagggcaatttctttctgctgttcttataggtcaaaattgtcccactgatgtgagcatagtagaaacgatttcttggggttagttttgctagattactccgtgccataaaaaagataaagaagattttataaacaactagacaaatgtccataaaattagcatcaggtaagcaaaaggttttggatcttaacgaacaatcatgtaaataacttatataactgctaactttttttaactaatgctaactaaatttaagctcaaaatgccttactatgttttctttttctctctttctttttttttttccttttgcagattagtgcagcagctacctgaccataggtgaacgcatcgctgctaacaaagtatacagataatgaaatgatttggaggtcatttaatcgatatctgattgacgtcctcaaccattgacacatactcatcagattataatatacatgaaggttacgggtcattaatctgctgattgtatgcatggaaagcatgaagcatcatgtcagatatggaaaccttgctaataaattaattgaattcagaaaaaaaaatctagatgcatttttccagttcaattaagaaagtgtagatgagtcagtattcacctaaagaaacgagtaccggaattgataacttgtgtgtatctccggtgagctttattgcctctttgccagagaataaacaaaattgaggatgacggtggatgaaaggctgccgccgtctagctcgttcctccacagcgaggtcagggagaaggaggcctaaagatgagcaggaataaagggagaaaacctgcagcagctgtggattaaccagagaccgtcgggggtggtcgactggagcatctcgctgaggaggatgtcgtcgtcgtcgtgtcgtcgacagtgtcgccgctcagcccgtgcatgtcgtccgaggggagcccagaatagggatgggcaggaggcagcgtcggcgctcgttctgcccggatctggcgcccttgagctcgtccgatgagggactggtggcgtggcttggatggtgcagcggtgacgtctgaaggggatggataggaggcggtgatggggaggagaaggttgccgtggtgcctggcatgggaaggagatcaggagaaggatgcagcggcggccggcagcaataggaggcggagcgatgaggaggggaggcggcggcgtttcgggatggcggataggcgggcgagaattttcagaatatgccatcgaatacgcaatgcttttaggatttaccatttaatttgtgctactttcagaatacgctatcggagtgcgaattttcttcgttcggtgccattccgtacccccaacgtcaatcacaccgtcatcgtccatctcccggcgccgccgacgtcagttcgccacctcccgcgctcgcgggcgtcacgccgtcgtccgtccgccgccgcccgctctcatgtgcgccacgcagtcgtccgtccgcccggcgccgccgtcgtcagtccgccaccgcctgtacccgcgtcagccgcgccgttgtccgttcgccgccgccatcgtcgtcgtcctccgcagcttcagggcaagcaagcgcggccaccgcgcgtgtttggggcggagctccgcatgtggggcgcggcgatgctccagggctgagcccggagctgcgtcaagatggcgacgatatgacgcgggctcctcgttgcctggattggtgtcgtcgatgccctggacgtcgacacgacgatgcgaccaccaaggccgtagaggccatcgccgtcgaggcctcatgccgcgaccgtgagaacacctcggttttaatcaccggggaaaaaaaggagtggctgtgtggggaacaagtagaagaaaaggaagctgaaaagaccaagcaagcaagcaacaaggagtctcctgcttgcttatgcgtgatattttgcattttaaggttgatgcttcgttctgggaaaaaaatatagcgatttgtgaatgttttcagtctaagattctggatggtgccattttgttttgagctcacacgtttcacccacccatcattctcaagttcgtcttgctgctatgtttgcatggtttctcctctcgaaataccaaaaaaagagagaaaagattgttgtctttgattcataagaacgaatgtttcctgaatattgagtaaggaaagagaatctgcttaaacggctttgtggcggagctggcgagcaggcagaggccgccacatacgacaacgtcgacgagctgttggtgaggacgacgacggggcggctgatggtgggcgacgacgacggccaagctgatggtagatgacgatgagggcggcgccgggcggacggatgactgcgtggcgcacgcgagggcgggcggcggaggacggacgacggcgtgccgcacgcgagcgcgcgaggtgacgaactgacgtcggcagcgccgggagctggatgacgacggtgtgaataacgttgggggacggaatggcacggaatgaagaaaattcgtactccgatgtgacgtattctgaaagtagcacgaatttggtggtaaatcttgaaagcggtgcatatttggtggtatattctgaaaattttcccggcgtgtgagctggtgacaccgccggactgacctcttggtgctaggtggcaaacgacaagataggggaagcctcgaggttggacctgacgcaaccaccaacgtcggaggagagtggagaagagccgagaggagtaggaaggcgacgacggtgacgatggagcgaggcaccggcaatgccacaaaagaaagagtaggggccggtgttggcagcagcaggggcctgggaggtaaggagcggagcgaaggagggaggagtgcgaggcgaggagctcaccggagcccaataacctcaccgccttgggaaaggaaggggatgaaagagacgtggggagaaatgaaaaagaagggcaagatggccattttgttcttagatcgggtgacatggcctcttgcgggctcaaaaatgacacacgagcaagaaatcctctctatccgatggcagaacagcgaagttatccgagagagtggcatttgagaacacgccatccgggagagtggcaaatagtccaaaaccccctccctccttgccatagaggccgtcagtgacggcgacagttgctgagccggctagggcgtgcacgaggcgcgttaccctctgcctccttcctagctggagccgttggtgagggcgagctggaagtggcggaagctagaactggccggatctggacctacaactcgacaccggcgatggagatgaatgcacgttaaggctgccgctaaaccaagccacaaatgaggagattacagtgaaggcaatctggcaatgcgagtggagcaccttgcaagcaaatgaagaaaatacctagaagtgaaatgtcttttgtagttgctatgtcagtcatttggcaaaatgctgggatactggtttattctatagtttgacagaattagttcctttagctagcttgcaatttttagttgcagacttggcataagtgatgggatggcatcactgacactgagtaagctgtttttatcttctttttccctttacctttcatgctggatataacgagcctcgatatacttgtactaatgaaactaggaggggttagacctcaatactattatactattaatatgtgatcctacttgtcgtacacacaatatatcttaaagtctgtgttatagctggctataaatttgtagaacgttgctcttctctctcctcttttatccttttgaaatatgtttataaccgacttatagtctactattgtatctcctctaagatatacaccgtcaacagcaagttctaatcagtgaatccaccggcagctatacaaacatcagaacacaagaaggaaaaaagcagcagcaacctaatgaagtggtaaatgctgcattcaaacggcagaagaaaaaggaaaaggagcacgtgtcacgccttgaaacccccaacacagccttgcaaaccgactggatatgaggaatctttatctcttataccgatttctgggtccgatcccttagcgttgattgggccacgtggctaaacctggaagcaattttacatatgataaaatcgcgccacgtgtcctatcccgtaacacggccccacacagggaggaaggttggaggagagagaccccgagctagaggaagaagaagggcaagatggtcattttgccctcggatcaggtgacgtggtgctttgcgggctcaaaaatggcacacgagcaagaaatcttctctctccaatgaaaaaaatagcgaagtcatccgggagagtggcatttaagaacacgccatccgggagagtggcaagcagtccaaaaccttgatttttatggatctcgattctcgagcgacgagaggttgctggcaacaatgggagcaaggtgaagcgccagcgacaccgcgtggccggccaatggtgagcaccaacgataagcttgcagtttctgataatttttagtgtagcagagctattaggccattcacaatgggtctacatggcattcagtctcaacccctaaaagcgaatattccttgccacatcatccaaccgcgtggctttctcaagtccgagtagccaactttggctatgagttcctgctctcaggcgggccccacactcattgctacaggaaagaggggcgaggggcgaggcagccaacggggagaggagcggcggcgccgcggggcaggtcgccggcgagctcgatctgcaaccggcaccgtcgctactagggccacccgatgttgtcgtcgctgctcgggccgtccctccacccggcgcctccgtcgggacggggtcgacgttgttgccgctgctcggtacggggggcgccagatctgagtgctggtaggagaggaggcggcggggtcgtcgccgctgcatgccgccggtgggaggagaggagggggcgggggctggggggtcgtcgccgtgtgccgcctcgtcgtcccagcgccggcgctgccctcgccgccgcgctctgccgacgggtgtcgaaacaagaattcggcaataataaaagggggtagcgcatgagacctaaaagtggatgggtgcggagacaaggatttagacaggttcaggccctctcaatgaggtaataccctactcttgtttggggatttgaatccgccgggtgtgttattgatctgatgatcaggttgtgtgtcatgccccctagagggcctcctgcccaccttatataggatggagggcaggattacaagatagaaatcttaaccaatacggtatcggtttcctaaatctattttacaatattatcaaaccaggactttagaccgttccgtaatatacaaggaaacgtaatacccaagtcaggaggtggaggagaggagggggcggggggttggggggtcgtcgccccaacaccggcgccgccctcgctgccgcgctttgccaacgggaaaggaggcggaggagaggaggggtgggggtggggggtcgtcgccgtgtgccgccctcgctgccgcactctgccgacgggaaagaaggcggaggagaggagggggcgggggtggggggtcgtcgccgtgcaccgccctcgtcgccccggtgccggcgccgccctcgccgccacgctctgccgatgggaaggaggagaggagagggagaacaggggaaaggagaagaggagagagagggagataaaaaaataaaaaagatgctacatgcattgtggagtatgtagcctataaagttctttgtctagttggcatgggaggaacaccaaaattgcagggcgctctgtgaatggccttagttgattagccagcagcttttacagaacatcactagatcagtcagccacatgattggcacatatgcttgtagtttctgaaatttttactgcatgtcctgaatctgaagttttggatagatgaaaactcaaataactcgattggatagcaacatttccaaaattttgttgttcaaaggagcacatcgattgattttttttctgaacttctgacgatatgtttcttgttgaaaaaggagatggattggattgtgtttctgaactgctcactacgtacatatatatggtctcgttgaacatgctatttttagcagtattatgactacaaaatagtagtagtttttttttgtggatatgaaatatggataaggatcatgcataggtaggcctgctgctagagttttgtttttgtgatgctttaagcatctccatttcctgctcttatctaaattttcatgtgtgcattattgaatttgcatgtgcaatacgtgcagagcactgcttccatctgaattttcatttgttcggtcattatttcgtcaatgcaatgttttggaaaaatggcaatagcatcttcagggtggacagcaacattgattttcattcatttcaaccccatgcatgaatcttttttttctcatttagatgtattgcacaatgttatcgattgcaggtcaggactaaggcaagccaaagaaccacaatgaaggaaatggaatctgaccgccatacttgtttgaataaaaaaaaaggtggtctcaagttatgcatgggtaatttaggttatgtttcttgcactacaattacgtatatgctactctgacttactaacaaatcatgtatacgataactcagagttttgctatgtgagccaaaggactgaagagatgaagttctcaaatttgacttctatggacaacctgcttaaatgaaaaatggcagtattgttatagcagccaccgttagaagcacaaacacatcacgggttggtgcttggcgtggctggtgatgacggaattgtggcgagatcaatatatgtttgtgatcaataattcttataagaggtaattctcacaagtactcacaagtaaatctaaattactcagaaagatatttctattgaaaatagagtaattaacagaataaaataaacatgagaggattaccgacatctccgaaattcctccgatttcttctactctactctcttcctaattctagtatacaaaatagtacaacagagcctcttataattcagctcaagcttggaagtgtgtgaagaagcgaatgagtgaaactccttaaataggcagttaatgacggttgtggaacgagaattgtccgaagtgccctccaaccgccattaggatcaaatcaggagcgtccctgccaaaccccaggatcaacggtggagatcagggttctgggctggcccatctggccctcaattttggcctgtggactcctcctgttctgctttatccattactgtgagttttgggctgattctctggtattttagtaaagtgtaaagcccctcccttgtatggatatgttccttcttcactttagactgatttttctcccaacttcggtggtttaggacctgcatcaattaaacaccaacactcgtggaatatgttagaattaacacctaccactatattggatgttttattatatgagttttatgcaaatgctggcggtataaaaatgtgtatttaacagccgccaacaatcgggatttctcgagtcctagttgatttctaagcctaattggacgtgggaaagaccatgggaagtaagtccacccctaatataaatataagggggacaagttcgattgaaacaataaccactcaatcgtcaaactcaatttagttatccaaaccctctatattctacatctccctccttgcttccaatcccaagtaaattctccccaaatcccctaattgctcgccgcctctcgtctctacggtgttaaaggacatcctagctggcctgccgagtctagcacaaaccagagcgcattcaccctaacagggtccctcctgggtgtgtgttcggcagcctctacccacaccctacagcggcacgtctccgggtgattccgcgggttgcacataacatgctcaagttgtggcggcgcgattctacatcaacaacatgcacatgcgtgatctacctgtacaggtacacatcaaccagtgactgttctagccagaatccacaaagcatagatgttaacaacaaaatttggtaagatacgtggacataaggatggatccgaagcggatttgaaggagttagtttggtttccaaaatgaaacaatgcatctgctggagtctgtatcagtcgatatagagttggatttgattagtcgatacatacgatttcgagttcatgatgagttcggattgaggattcagaattattgccatacaaggatagagtccaaagaagcaattgcatctattaattaggataagagtaagctttcctttttgtgttttagaaatctatattagcatccacaatgggctggtgtgtttattttgtgaagtttgaatcatgtccgatatgaacaagttttgtactacgagtataaatatatgcccagggtcttgtatgaagaacaacaacagttcaatatactctcagtgcatcgccaaactttttgttttcaattttctcaatgagttcttgtttcgagttggggcatcttcttcgatcttccgatgagaggtatgacttgtcacagtagtttgcatcggtggattagtataacgttttaaatgttctaatctatctattgtagctgctggttatcagttatcttagtgttaacaatggaattttgcatcagattcaaaaaggaagaaggaaaccgaagcggatttggtgtggtatcaagtttatctccaagacggactaagcatcagctaaaaattggacaaaggcttggcttggccggtacgatataacttgggctcggcatgggcctagatcaggataaccggcattgccaatcagagatagagctcatgtaaggcaattgtatctattaattaggatagttatgtcagtttgttagagatttggtaagagaccaccgtatatggtcttgtttgtattttatctttagaaaggttcgagtcgtgtccataatggactaagtttgtattcggggtataaatatgaaccccatagcattgtaatacgggagataatccaatacaactttggcgcatcaccacccttttctcttttacttttcgacgagtttgcttcacaagaagcaacccgtctcgatggcttgtgctatcgtgggctaatatgtcatttttagatattttagtcctttttatcgtgaccatcgttatcatatgtctctattaatttagtcttagcatatcaatttagctctatcggttgcttctcgctttaggggtcctgccggtatcggctaaatcgtgttgctagattagattagcttagacatctaccaccctgaaaatttagtcaatggcttgattgtttagatatcatgtttcttttcatacttagtgccgcatcagtatattcgacctactaagtcgtgtttagaaccatgatctctagcctgtttcttgattgttaataagggtagtatcggggtttcagtcgatcttacctaatatgcatactcctttactaaagttttatgtatatttgccacttatatagacagatctccctataatcacgtcccaaaacgactctaaaatacatcctctaaattatgccaagaataattaaaatccatgtgaaagcctccaacaattaaaaggtgcaaagttaaaagtcaaataaggcttgggagatttttgtatatttcctaaaagcctaaaatgcgtaaataaattttagtggaattttcagagcacaaataataattattaagaaataaacaaagttaaaatgattttataaaaagaaaaactctaaaaagtcccctttccctccctctccctcttgggccggctcggcccatctccctccccctccctctcctctccccgcggcccatccggcctcttcccgcgtgcgcgccgctgacgggcgggcccgcccgccaccctcgctgacgggtggggcccacccgtcatccccttcctcccgccgctcccgccgcctcgcccgcgccctagcgccgccgccgccgccgccgcgaatcccgccgcctcccgccgtctccgcgtgcaataaagagggggaaatcactccccgtgatcccctctccctttccccccatttttccctctctctctctcgttcaaacgggcggatttgcccccgcaaatctcgccggcgccattgatggcagccggacctcccgcgccggtttcctcccttccccggccaccctctctcgacccggctctatttaaaccctccccgcacctcttccgtccgtttccgcctctcgccgccctttctcctcgccggaatcgagctcgcgccgtcgctctctctctctgccgtcgccgtcgagctccggtccgccgccgtcgtcgccccggaccacctcccacctcggcgccgcctccttcggcttcgccgcatcctcgccgacctcgtccacccctccatttcgctcgccgcccgccggaacgccgtcgaccccgtcgacccgagccgcgccgccgccttcctccgctccggccgcctttttcgtcgtcgccgtcgacctagggtgagccgtggaccgcctcttcttttcccccttccctttccctctctcagccgccgctctgccgtgcctatggccaccgccggcgaccataggggcgcgggcgccgcctcccgccggctgtgccggcttggccgccctcgggcgcgccgagtggctgccgcgtggggcccggccgtcagccgcccgcgcccttaggtgcggctgacgcgtgggacccacggcgccggccggtgtcacaccccgaagttctcctcccaagtctaaaatttaatttataagagaccctaagaaaataccggtgcaaagcaagagtaaacccttttaaatcaatgcaaataataatcggaattggcatgtggaatttttcttgagttctacatgtcgaaattcactaacaggatttttagtggaattttcagagccctagaaataattttaaccaattaaaattgagcaagaaatattttaattccagggaaaatccttttctctttttttttctttctttttctttttctttttccctctcttttccgaatgggccgctggcccattctctcctttcctccccctcctccctgctgggccggccgcaggccgaggcccagccaggccgccccgcctccctcctctcccggggtcgccgacaggtggggcccacctgtcgggtcctcccccaacctcccgccgctcccgccgcaccaccgcgcccgcaaccgtccccgcgcccacgtctccgcctcctccgggccacgtcggccacgcccgcgcgtgcgccgcgttccccgcgcccactcccctctctctcccgcccgcgcccgcgcccgagatggccgggatttgattttcgaatcccgcctctctctcctcccccactcccccacatcggccggcgattcccacctctcccggccacgtccggccccctctctccctatttaagctcctctgtcgccccctctcgctttttccccatttcgccgaactctcccaagcctcccatcgctcccgcgccgtgcaacctcttgccgccgccgtttccgctactccggccgccgctagccgctgctagggtcgccgccgcaccgcgccgtcgccgccgtcgggttcgcgaggctaagctccaccccggccgccccttccccgtcgggattcatcgccggaattcgcatcccctcgcgctccggtgagttcaacctctaccgccgccttcggccatgaatgccggtcgccgtggttcatctcccccctctaatctctctcttctccttctttagggtaccccgaatcccgtccgtcggttgccgtcgtcctcccgtggctcgtggtcgtcgttcgccgtcgtcttcctccgcgccggccaccctcggtgaggcatccctcccctcttttccccttcctcccctcctagtaccgcgccgccgcttcaagtcacgcgccgtcgccttcggccgccgccgccgcctcccgtgccgccggtcgctgccgccgtcggccgcgtgccgtcgccgctagccctggccggccggtcggctttgatgtcgagccgagcccggcggccgcctctatcgccgcccgtccgatcggccccgagggcgatctgggccgtcggtcccgtggaccggcggtggaccacccgcgtggtcccggtccacggtgaaccgcccccccttgagccgctgaccagtggggcccgcctatcggcgccgcgcctcccccgtgctgacgtcagccctggaaaatattgcgcaataaattatttaaggatttttgttatagtaataaacacaatgaatcttctaaaattcataactaattcatccgagctccgtttaagcccattcaagtctcagtaaatcaagaaaaatgtgtagaatccattaaaaatggttttgttctctgtttcagtagtcttatagcctgtttgcaatgtttgccttgtatgtcgctagattccggttcctccgacgctccggtgtacttcgaaatagtcgccgaggttcctccagcagcagagcaaggcaagtcatgcttgtcacttgaatatgttgatcctatattgcaaatgctctattattttctttcaaatactgaattgttttataatgttactatgggatgtttacctattgtcatagccatgctattgttgtaccatgtctctttgtcagcttggggttataacatgattagagtttggactagggattgcttagccatgcttagttcaactagtgcacaatggggaaaatcttattaatgagtagactgttggttttaatggttttgttggattagtgccaccgctttggtgttggttaattaaaataaatcacatggtgggctgtgggtgcatggttttgctggtcgcacccatggcagttaaggaccggttcgcgggatgccctggaagaacttatcgtacttaccacaagccagcgtgggcaacggctgggcttgtagcgtagcttttctctagccgacgcatccaggcaagggtgggcgtgatggagtttggatgggtcctgcgacggcctatgcggcttccggattcacctaggcacgagaggggactgctcgctgccttgcgaggagtgggggtgaaacctgaggtgtggtgtgcttggttagagggggttatgcgaatggtcctgtcacggcctctttccggtatgtcgtggtggcatgtcggcgcacggaaacgtgtcgtggggctgtgtcttgtgggtacagttgtacacctctgatcagagtaaaactattcgaatagccgtgaccgcggttatgggcggtcgaccagattcaccgtgattagtctcaccctagtgtaatcttttgaatttggatagtttaggtggatggttgggcctgttgcaacgtgggatagcgttggacagtggatagttaatactaattaattattacaactgtttaatctttcaacttctgtttataaatgctcgctttatgcaaatgaaccactttagctcttctttgatgattccctgcatcatgcctctattccggtatgacttgctgagtacagtgggtagtactcagtcttgctctatttttcccaaccctagagtacgagtatgtgtcagatgaaggtttctccgaggagtaagcttagtccgtgccgtcgaggatgcctgtggagtggtgttcccgctgtagttctagtcaaggcttagctcctgttgtctctctttctttccgctgcatttatgtaagacttttatgatgtttgtaagacgtggatctgaatgtcgacattgtcgtttgtgtaccccggccggtcctggacggggatttcaatgcacattctgcttggaattctattcgggaaattctgggcgtgacagccggtgtgagcccgggtgcacccggtccaccgtggaccgtgaggctgccgcgtgggccctactcccgtggacccggtccgcgcgccccctcccctcggctgacacaataaacccttttaaaattaaaatttaaatgaagaaattcgcaaatattcatttaaagagcatataaactttaaatgaccataagttggccatttgaactcggaattggaccgttcaagtctctaatttttccttaagaagtcaagaacccatttttgtgctttgttccagcttgttatatggagtttattagagtaaaagccttttcttttccgttggtcgtgtagacgctgcagcttcggaagatccgctcttcgtggaagttgaagccgacgtttgggaaagcgagcaaggcaagtcacatcatccttgaacatattgaatcctagtttataaaattattttgatttaacttattgcattatcgctttatttaaattcccgcgttatcattgttttatctagccatgcttatgtacctttgttatgaccttattattgttattgttattatttccttgttcaccctagaataaacaaaaccccaactagtggacactctactcatggtaccactagtataattttagttagatgcttcgctggttaattaggtaacattaggtggtttacaactctagactttgggaatactcttatcacctggacactatggaattgttggactattgtggaattggattcacacctcctcctctattcaaaatcctcaaaatggttttaggctgggctcggggtgcatggttttgatagtagcacctcggccatataaggaccggtcttcgggcctatgttgcaaagcactaccgtacttccacatgtctagtgggtaaggcttagtttgtggctcagtctggttataaaaaaaagtacacggatggagatggacgaagtcggggggtcgatggacatctctagggcaaatgaaggctacacgagctgcggcccggtagtcgagatgtcatggcacagggccggtgtcctgctgctaggggctcagtcctgcctacctgtcccggaggttccggccgtaggtggggttgggtcggtactcttatctatggctaggatgggttggaaactatgtcacgtcttccgtccatataccgtggtggtatgtggcacgtggttacacgtgaggaagatgtgtcttgtgggtaaagatgtacacctctgatcagagtataatctattcgaatagccgcgccctcggttatgggcaagccgagcaatgtacccaagttagtgttttaattcttaaaacctgcttaacaactaaaatgtggaatggttggcctgggttggcttgggacgagctgggacgcagggtcgggttgccagttcggtctgaatcatcgtaggccttgggttaaggcaggttcgtgtgggttcacggccttgtttaataatcttgtatagctctaggatcgtatttacaaaatagctttgagcaactaagtgtcttttaatgctgtttgctgcaaaccctaaccctttatattataacccccttgtactcccttgcatttatcctgcacttgtgggtgtgtcttgttgagtacggtggttgtactcagtcttgctcaatttttcccaaacctagaagaggagcccctggaagatgaaggctttggtgtctagctcgcgcctgccgtcaagcgcctgtggtcgtcaccctagtcttccgctgtttcccgtttgtctttgtgtgtgctgggtcttcgccgcccatgtaataaattaactatttacgcttccgcttgttaaactctgaactatatcaacttttggtgtaccttgcctcctgggacaaggaataatgcacgcacgtaaggaacgcccgttgggttatttttggtcgtgacaatagttatgtcaaaccagattggtatcggctgggctatctaaactactaaccaattatagtatgatatatttatatagattgattcgtctatataagcatgtactagagtattagctagtacattatcttccttgctctatttgctctaaatattgttctatcagctactttcatagtattgtcttaaacttctttattaaattttgatggacagtattacagccaataaggcatgtttagagtttaatattcactaatttacctagtctatagctaatttggtataactatatcggctgagaccaccaacgatatgctaccggcccatcggccgatcggctatcggttaactaattctgctttttgtctttcttgctgattgcaggattaactcagctagcatgcccttaacacactcgaggctagccttggacctgcactggagttaagcagatctcccaggccgcattgtttttacatcaacacttagttaatctaacccgatgactcgatttacttgcatcggccaagccttttgtatggttttgctagtatcggctaaatcgtttagtcagtttagattagctaagatatccaccaccctaaaaatcaataaaaagcttgattgtttagattttatgcttccttccatacttagtgctgcatcaattgagtttgacctactaagtcgtgtttagaatcatagcaactaaccttgattgcaaataggggaagaatcagggtttcagctgatcttaactgatatgattgcctttctttgtttaatatcttcaatctagtttttcatgttatatctgccctttatataagtatatcactctatttaaatatatcaagcttgtattcaattttggccagattatcatatttgggattgatgcttgtttggtatatttacttagaatgatattcttatataaggttgtatcagagcaatagccaatattgtatctttattaacctaaactctatatcatctgctaagatattattgacgaaaaatccgtgatcggccgatagtgccggaactgtgttggcgcgaactaagccgacgaacacagcggcttgggagatctgcttagctccagtgcaggtcaaaaatattgatgagatgtgggcgtgccagtcattttgatcctacaactgacaagatatgtaaacaatagatcaaatagccgatcgactaacaagccgatggagcaattctagtcgataccgataccagccgatgtcgatagggttttgagcaatcagctctatgtacaattaatgtagattctaacactcgagtaaataatgatatatagataatcggctgataataatatatttaagcaacaatataatctaatagaaaccaatcggctaataatgatcaagtgttgatccaaaggttaaagcatacatcggctggaggtctgatgtcaataaatccaaacgattagataaacagtaaaacctttgctgcaatcggctaaatccaacttgtatgtaatccttataagccgatgcaacatccagataactcatcatctgaaaccccgatgaaacccttattagcaatcaaaaagcaggatagaaattatggttctaaacacgactagggctgatgcagtgcaaggtatgaaaataaacataatatctagacaaccaagcttttcactattttttagggtggtggataccttagttaatctaatctagcatgataatttagtcgataccagcataaaccctaaaacgaatctcaaccgatatgatcaaattaagatgctaaactagattaactaagatatatgataactagcggtcgtagaagatagattagaatatctaaagcgatgccctaatccgccaacgcaaaccactgaaacaagtcatacctcttgtcagaagatcgagccgatgccctaactcaaagcaagaactcgtcgaaaaagtagaaaggtaaaaggtggcgatgcgctgaagttgtattgattgcgaaatagtttacaatgaccccgggtgtacaaatttatacccatgggtagatactagtccttgttggacaagaaagaaactttactaaaataaagaaaatataaattccttatcggacactaaacacactttcctcaagataaaaggaaactaacaaactcttcctaattaatagataaactgtcatggagcatcctctttgaactcggtcatttctagataaacttcctttaatagattcctttaaaccgaatctactaagaatccgactattggtgacttgataactcccatcggccgattccaagatgctaaagctgatagtgaatctaagccgatgatgacttcggggcttatcaaattttgatgttaacacatggttacagatatgatccgcaagcgcacagatataccattgtagcatttcacttggaagtattccaaggtatcgtatttatttaatcccaagggaagatatgataagagagtactttgctactaatttatatattacttgtatacatcaaagtctatgcaggggttaattaattcaagggtaggataaggttgacacgaagaatgaagaactaagatactctcactaatatatataatctaggctaaatggagaaagaataagaaaataatcattcctatacttctagtatacattcatctttagtttacaatcatgtagccaataccccctaactatgccctcgcggtgtttctagagactacccctgatgccgagttccttacaacaatccgttatgaccatccaaccggaaatgaatacggaggagtacccataccaggaaagtgtctttggactatatactaacatggaggaatacccgtactaagctatcaccatcagcagcccacctctactgacctgcagtatataaccccaattaatgatatctaataatctaagcaccacgcttacattattaaatacaactctacatccccaagaacgacatagagcaatcactcgcatgaacattaaacccacaccaatgcatatctcaggtaagctagctacacaattatatcgagacaagtataaagtaaagccgatactcagataatataaattaagtaaaagaccgaaactatataaagaagaatatttcattaactctataagtcttacaaaaggaggaaaagctactagagccatacccaaaatctcttgaagactcgaggactaaatgaactattctattcctactccactagcacaagaatactgaactaaacttgagagagagctcttgattttcttcttggagtgtgtgagggagtggaggaggtgatggccttatataggctactgttggtatttcttaacgacattactagaaatataattcccagcaatggcgcagaaatacttctggtatattatggttacagagttcatctgcaagcgcacggatataccattgtagcatttcacccgagactattctaagggtatcgtatttattttatcccgtgggaagatcaagtagagagagcttgactaatagtttatatataacttgagataatcatattctaagcagggattaagataatccaagggtagagtgacacacaaacattactactcatcctcataataaattatctaagctaggtggaaagaaaagagaaagaaaatctattcctatacttctaatatacatagtatacatatattctagttaactgatatactagctaatactctctatccgatgctctcctggtacttcgagaagccacccctgactgccgagttccttacgatagcccgtcatgaccttacaaccggggctaaatacggaggaatacccttcccaggaaattaacttaggattatataccggcacggaggaatacccgtactgagctgtcaccatcagcggcccacctctcatccacaatatataaccccaaataatgatacctcataatctagacaccacgtctaaactaccagatactactttaatatcatcgtcatgacatagagtaattgcatatgcaaacattatacccgcaccaaagcatctcctccactttagtgtcattccctgcaaatactagtggaagtttattattctaatacatttatgcattgcaagcatcactagttctcctctattttggtaatattgacggtcaaaactgatctataacgaccgtcaacaaaaccccccaagcttggacctttgctcgtcccgagtgaaggacgaaaggaatcaaagacttggttgttgatcaggagttgctactatgctgcatatctcaaagatacaggtgcaaggtatatgtactctctctcagattaaataatttttggcacggtggcttacccttacccctgattcccacgagacactgcttttccttgccttgggcggttgaaagattgaacagcaatttagagtaccaatcacccgatctttatattcaactcttattccggaagttttcaaatgattttgcaaaaagaaaaccaagttcctcaaatgattcactcagtctctcttagtgtatcaacatgaattcctcaccaaatgttgtcttgttgattcctactctaaggttttatatgtagagctcggtagggatcaaacatggcatacttgcattcacatttattactaagtcaaaaacttagactagagcagataactaaacatactcaagatcaagatcgtgcataatgtgtgtgtggtatatggtggaatggcacatgaataaaaaaataaagaaaatgcttctcctttgcgcttactttcttctcccaaaaatccttcttttattgattaggagagggcatggctatattattttttttcaatcatgctcatgcttgatggagcataactttatttttttttctttcataaccatgcctttccctccttctctctttttttttcaaaaagtatattattttctttaggagaagaaagcacatgaaagcatggagaatttattttgatggtaatatggaaatggaatggaatattgcttagctcccagtgtaggagtttggcatatgcatatatgtgggtgtatgaccttgatcatagagcatgagaagtatctacacaagtcacaagagtttgatagagttcaatggaatgacaagcaaccaaaatgtatatggtttaatcatgatagcatatttttggctctggtaggaatttatatcaaatgaggaactttcaaatttattagtttgaaaaacaaaacatccggaattcaagtcaaactagtatcaggatcatagtaactcttatttactatctcatatctcacaacaacctagacttagatcagcaagtgcagcccatttacctgaggttcccggataattgttggctacttatatttaacctttgagagagtatttaccaagaacccatatatcagagatataaaatagagcaactatttatcatttcaacaaagagaactagcttgtcttacctagcttgactcaaacctatcctatctttttggtattttatattttgcaaatttttatgttgttttcaagttttataaaatgcaattggaaagggaaatatgcaatgtgatacaagttacctcaataggggggagcgatgtctccccccaagcttggctttcgctcagggtccttgataaggattgaacccccgaaaacggaagtacgcttgaaggtcatcgtgcttttgctgcatcatgttgttgttgttggcgaactgagcattagcagattgttgccattcttgcgtttgagctatgtgttccgtgaggttgtactggatctcccccgtctgcatatcaagggtgtccattctcttagtgatttcacccaagtcccaacgagaggaactcgagcgccattcacttggagatggaggcacaccacttgatctgggaggttgattgtccccccattggatgtcatgaggcgcatgccaccggtcctcactggcgcttgtccaggttgagattccgatgctatggcgtggagcttgggtccacccgggtgcatcccagttggtgcccaacctgcatcatacatctgcacgggtgttgaggatgatgaactttcttgctcattccttgtcatgttgcgcgtctccctgtatgttccacctgcacgagattcttctatggtctgcaggggaatggttacttcatggcagttgtacaaatgataccccgcatttggcaacgggatttcatttgtacaaccggggaaaaagtatatcaaagatccatctgctccatgtttcacaatatgcccttgcactagataagcctcatcaatacgcggacgagcggctgagataaaagcaatttggtcgctaacgacccctagcccttttgctatccgagtaatcagagaagtgcactaaacaggagcagagaactttatactttctaaccattgccttatcatacatttcacaggagcaattttgatttttctaaccatggcaaacatgataattaattcatcccctaatgggtatcagatcacctctaggaaacaaagtcatagcaatccatttgtacatgagcctaagtgtaggattatggatatcattcgttctaggtttcttgcaaattgaagcaccagaaatgtcttcccaaaacctatttttctcgaacccagaaattcctttccggagatcgattttataggaattgtgaaatccaagaagtgtactcaagcctttccatgtgagtgtgaactccttacgaaaaaagtgaaaagaaataccatattctatttctttcaagtgcacagaaattgcaaagtaagcaaatgagaaccaggctcatctaccacagcaaatctcttccaaccaaaaactttccagatagaacaaaattcaacatccatacctatcttttttagcaactccgaagagtattctcgcgtgtgagcatactcccggtcgctcagcatgtagtaggcttgtctctcccgatcactgacaaggtcgaggtcggtgtcgttcaggagtcatcgcggaactttggcgtcttccatcaagacatcagctgatgaacgagtactagactcatcatgatgacttgatgaagagccggaccctttgaatagacgagacagtcgcctcctcatactgcacaatggagcaaaagtggactaactcggcgggggttagaagtgacaagaatttcacctgccagttagtttcaccaaagcaacttgtatatatatgcaactaaatttttgaatttgagggaaactatcaaagcttgaatgaacttgagagcaaactttggagcgggaatgaaaatgtgttgaaatgggatggaattccctctcccagccgactggcttttatagggtgcccacaacggtcagaaatgacatgtgggacctactagccgttaccctgccaaaagtggcagggagccgttgcctggccggttcggccgaaccagggtgttcggccgaacccctggtgggcccaaccagccccacttttggccgttggattccaacgatcagtgtggtcgtggcacagtaaattttcgttgaaaattttattttggtttgctctgaaaaattcatttgaagaatttcctcaaaattcaaaaagcctaaatgcattttgaaattcaaatatgtgatgatgcaagaattcaaattgttgaaagcaaatatgcggatacataccaatttaccttttgatgaaggtcgcatcattttaggtccgacgtgcaagaccgtccctcctttcggttcagtgcgcggattttccacccgtctccggaggtgatggagcgggcgtctttggttttccttccacaccttctttggttttggtgcggaagacggcttcttctgagccggttgctctaacttcttggccggtacgggtgattttaccggcgttttccaataacggttcctgggcatcgttgtttccttctccaggaagttctgcataaatttcaccaggctgtccgttttgggtggctccactttaaccacttgaatattctgcgggttcgacccgtactttattctgaccatggagcattgttccgtccttggttgaaactcaaatctttcctccttgccattgatatggaaacggatactactcgttcccacatcgatgttggatcctgcggtgctaaggaatggacgccccaggatgagtggcgtctccttccccgtgtccatgtctagcaccacaaaatcaaccgggatgaagaagtcccgtatcttgactggcacatcctctgctatccctaccgggtaacggactgatgagtcagccaattggaggtacatcagtgttagtgccaacaccgtgaagttgagcttgtcgaagacgtcttttggcatgacgctgatgctggctccaaggtcacataaggcctggtcgaattgttgtgccccgatcgagcaggtgatcgtaggacaccccagatctttcttcttttccgggagcttatggagtatgacgttgctgcattgttccgttagcttgaccacctccattgttgggagcagtctcttgttgttgagtatatctttgagataacgggcatatgtcggcacttgtatagcgtccaacaacgacacgttgatgtggatcttctggatcacttcaacaaaacgagcgaactgctcgtccactgacggtttcctcatccgttggggaaacggcagcaaccgtgtgtcacagtattcctgcagcacggtcttttctggctgaatctccttgtcagccgagtcattagatggcgcttcttttgacatcccattagttcctgcagggttaggatatggcggatcacgagtggacttacctcccctcgtcgtgatcgccttgacattttcaatggaggagtcgggttgcctcggaatcctcccagtttcatttgcagggactaaagatgctaactgagctaactgggtttatgtcattttgttaaagctcagctgattttgaaaggcagaagcaaagccatctaacttgacattaatgttctctaggaccttatcattggcagcaagttttttgcttaatccatcagtggtttaagcttgcgcaaaaatgagatccttcagggagggctggttagagaagttaccgttattgttacctccttgataatatgggcgtggttggttccacccctgacctccttgtggacggtacccgttgttgttgcccatgtacatcgcctcctcacgggtttccgggcagtcattcccagaatgacccgtgccgccgcagacctcacacgtgacgtgtgagtccaaggccttgacggtgccttgtggccttttctcatggtcgtccaagcgtttcatgaggaggtccagcttggcagcaagtagctctgtctccttgacggtgtgtatgcctcgctgacgggtctggagtcgttcctcgctccaacccatattggagaccatcttctctatcagttcaacgactccttgaaccgttttagaaaagaaggctcctccagccgtagcgtccaggtgatcgcgggacattggggtgagtccattgtaaaaattctgcaggatcagccagtcgtccatcccatgatgaggacaggcggccacgtactcctgcagtcattcccatgcttcgggaatagactcgtcccttgtctgctggaaactggaaatccttccatgaagggcattggttttgcccgtcgggaagaatttcgagaggaatgccgtagagcatttgtcccaggtgttgacagcagcatggttggcataaaatcactactttgctctcccgagaagggagaacggaaatagccgcaacctgacgacgtcgggactgacacccttaatggtgtacgtgctacagatctccaggaactgttgcagatgagcattggcatcctcattaggcttgccatagaacgggctagcctgtgccatcgtcatgaggctggacttcaagtcaaaatccacgtcccctatgttgacctgcggcccaatggccacattgtcagcagagggagcagcgaactcgcgaagagtcttgctggccatagtcttgaaggtcggtggcactggtagggctggtttctccgttggtagagttttctgcgaagcaacgactcgcggcctgacgctcggaagaaagcttctggattttctttgaagttttccggcaggttgaaacctgtcatgcactaccctgttttcacaacaaaaagtgaaaacaaccaaggttagcctgcaaaggaaatgattatatagatgtaaatataaagtattagttcaagtaatctctattatgaatcttccccggcaacgacgccagaaatgcttgttggtatttcttaatgacattactagaaatataattcccagcaatggcgcagaaatacttctagtatattatggttacagagttcatccgcaagcgcatggatataccattttagcattttacccgagagtattccaagggtatcgtatttattttatcccgtgggaagataatgtagagagagcttaactaatagtttatatattactttgtgataatcatattctaagtaggggttaagataatacaagagtagagtgatacacaagcattactactcatcctcataataaattatctaagctaggtggaaagaaaagacaaagaaaatatattcctatacttctaatatacatagtatacatacattctagttaactgatatactagctaataccctctatccgatgctctcctggtacttcgagaagccacccctgactgctgagttccttacgatagcccgtcatgaccatacaaccggggctaaatacggaggaataccctccccaggaaattaacttaggattatataccggcgcggaggaatacccgtactgagctgtcaccatcagtggcccacctctcatccgcaatatatagccccaaataatgataccttgtaatctagacaccacgtctaaactatcagatactactttaatatcatcatcatgacatagagtaattgtatatgcaaacattatacccgcaccaaagcatctcccagataagctagacgtatatttagtataacatgaacataatgtaaagtaggtactcatatactcggaaagtatttcaataccataaatgtatatagaagagtattctaataaaagtacaaagcttacaaaagaggaaaggaaagctgttagagccatacccaaagtcttccgaaggcttccagactcctgatttctactctattcctattccaccagctagatactactaaactaaacttgagagaaatgagagagctattgcttgaggtgtgtgagtgaagtgaggatgagagctccttttatagcctcccaatgacggttgtgactgttggaatggtcggtaataccctccaaccgccactggggagccatctcagccgtccaggagaaccctggatcaaacggagctgcgggaggttcggccgaaccaccaggttcagccgaacttggggccggcccaatctagcccaatttcggctagcggccttctccgttgttcttctcctcagacttgtgaattttggcccagtttgtcgtgtcaattctgagttcttggcccattcatacatacgtctggttctcgacatcgtctgattgatttatcgtttgagttgatgtcgattctcctccactttagtgtcattccctgcaagaggttagcatgcctaatactagtggaagtttattattctaatacatttatgcattgcaagcatcattagttatcctctattttggtaatattaacggtcaaaactgatcgataacgactgtcaatagctaccaatgacggttgtggtggttggaatggtcgtaaataccccgcaaccgtcattggaagggatcctaggcatccacgtgcaagggggagccaacagccaaccctagttaggcccaaccggcccagtttttggtcggtgtgttgcctgttgatccatcagcccagtagtgtgatggttgggcctatttgatattatttctcttagtaaacaaattactattacatcgatggttctcaacattaaatatttatcttgccacaaaatttcacttagtaaataaattaatattacaccgatggttctcaacataacatattcatcttgccacaaaatttctcttagtaaccaagttactattacatgttctcaacatattatctcttagtaactaaattactattacattgattgttctaaacatattgatcttgccacgaaattccgttccctaaactaattaatcctactgatcacaaacatatattgatctcgccacaattccgtcatcaccggccacgccaagcaccaacccgtgatgtgtttgtgcttctaatggtggctgctataacaatactgccatttttcatttaagcaggttgtccatagaagtcaaatttgagaacttcatctcttcctttttgaatctgatgcaaaattccattgttaacactaagataactgataaccagcagctacaatagatagattagaacatttaaaacgttatactaatccaccgatgcaaactactgtgacaagtcatacctctcatcggaagatcgaagaagatgccccaactcgaaacaagaactcattgagaaaattgaaaacaaaaagtttggcgatgcgctgagagtatattgaactgttgttgttcttcatacaagaccctgggcatatatttatactcgtagtacaaaacttgttcatatcggacacgattcaaacttcacaaaataaacacaccagcccattgtggatgctaatatagatttctaaaacacaaaaaggaaagctgactcttatcctaattaatagatgcaattgcttctttagactctatccttgtatggcaataattctgaatcctcaatccgaactcatcatgaactcgaaatcatatgtatcgactaatcaaatccaactctatatcgactgatacagactccagcagatgcattgtttcattttggaaaccaaactaactccttcaaatccgcttcggatccatccttatgtccacgtatcttaccaaattttgttgttaacatctatgctttgtggattctggctagaacagtcactggttgatgtgtacctgtataggtagatcacgcatgtgcatgttgttgatgtagaatcgcgccgccacaacttgagcatgttatgtgcaacccacggaatcacccggagacgcgccgctgtagggtgtgggtagaggctgccgaacacacacccaggagggaccccgttagggtgaatgcgctctagtttgtgctagactcggcaggccagctaggatgtcctttaacaccgtagagacgagaggcggcgagcaattaggggatttggggagaatttacttgggattggaagcaaggagggagatgtagaatatagagggtttggataactaaattgattttgacgattgagtggttattgtttcaatcgaacttgtcccccttatatttatattaggggtggacttacttcccatggtctttcccacgtccaattaggcttagaaatcaactaggactcgagaaatccctattgttggcggctattaaatacacatttttataccgccagcatttgcataaaactcagataataaaacatccaatatagtggtaggtgttaattctaacatattccacgagtgttcgtgtttaattgatgcaggtcctaaaccaccgaagttgggaggaaaatcagactaaagtgaagaaggaacatatccatacaagggaggggctttagacttcactaaaataccagagaatcagcccaaaactcgcagtaatggataaggcagaacaggaggagtccacaggccaaaattgagggccagatgggccagcccagaaccctgatctccaccgttgatcctggggtttggaagggatgctcctgatttgatcctaatggcggttggagggcactttggacaattcccgttccacaaccgtcattaactgcctatttaaggagcttcactcattcacttcttcacacacttccaagcttgagctgaattataagaggctctgttgtactattttgtatactagaattaggaagagagtagagtagaagaagtcggaggaatttcggagatgtcggtaatcctctcatgtttattttattctgttaattactctgttttcaatagaaatatctttctgagtaatttagatttacttgtgagtacttgtgagaattacctcttataagaattattgttcactataatcgactaaaatatagtgattgctttagtgagttagaaacactaaagtagatattaattgctcagacgtggtgtttaggtaatttatatccagtaattgttgtgtatcccacagtacgtttgaggtgggtgtagaggtggtgacagccctcaagagcacttaagtcctccctgtcagggtatgtagtagagcgacatctaggaacagcgggttgccagtgtctgaattatcgcgttaggattaaaattaaactttccttagacaatgtttctcactaggaaatcctctctatcctttgcgcatcttagcttggtgtccttgggtgaacctgataaggaagtaatacccgttgcctgtggaaatcgatacctaagaataatcccaggtgaagtgctgcatttgtgacgttaagaaataccaacaccgatctaaaacaaggaaatacgagaaatacctaaattggactctgactctatgctgaaggtctgaccacccggcggtctgatcacagctcattgtccggtctgaccagccacactacggcggttagactggccttcgcgggaatgacttggtagtttccaaatttggctcaaactagctataacatgacccgtgtcaaatttggttactgcctatagatcatgtgacagattttttagcctcctatgatgcacatttcttaccctttaaatcaacatctaacggatgacattaatatgcacaaacaaaatacaaaaaacaaacaaacgagccacgtggacaatctgaagctcatggggctcaaatgggctcaagtagatttcaaacttacatcgtaaatacactaaaattatatatgtaattttcagacttacatcgtaaatacactaaaattacatatgtaattaatatataattatagtgtaagtacgatgtaattagtacgcgtgggatcataaataaattagcattgaaaaacacgtacggctagtttaacaacagggaacagtaacgtggacctagttaattagcaacgtggacctagttaattagcagctagatgctagcacggatctcaaaaaccatatcctacggcaaaaatgcgaatgatggaaggctcataaatcagtcaaacgatagttagcaattccgttctaaatttggctcaaactagctataacatgacccgtgtcaaatttggttatcaacacatgtatagctcggatggaggtgggttgatcgatcttatcaggtgattgaatcgtcatacatgcaaaacaaagcaatcatgaaaatcaatccgtcagtaagctgaaagatatagatgcttcatatatcaatgtattgtgtgtgattaagtcatgcatgccggttgaattacacatgcacacgagttaaatcgtggttgccggcggctccgcgtgcgattaacgttaataggttgtggacacaacccgtagacctgccttgttcccatgatgagcgtgacccgcaccggcgtgtgcattgagtgcatcaaggagcacgtcgggctgacgcactgggatgacgaccactcatctcgatctcagctagcatttgaaaacaagaaagtaacaggagatcaatctacctttagatatcaatctaatagaagttagattggaatgacaaacccaggttagagatttgagccatcaaactcgttgagattgatctcaacacttctctagaagttgattctatcgcacttctcgacaacaaactcgacgcgaccgctacctaacgtgccaaactatcgattttggaaattgacaatgataagggggtagggcacgagacctaaaagtggatagatgcgaaagacgagagtttagacaagttcaggctctctgaataagaggtaatacattacttttgtttggggattgtattggtccgatgatctgactgtggcttatgttgctataccctttaaggtctccctactcaccttatataggttaggggcagggatacaaattaaagagaaaaacctagccggacacgatacagtttgctaatctattacatggtagtactcaatcgggactctaggtcctacaatagaacacaaggcaacattgtgaccgagccatactttatctctatctctactattataaaaattgaagatttttttgctagaattttatatttatgtcaaatcctttccttttttcttacgccagagtgtccctcttatctaagatgcgtgcaaattaattaggcccgtagcatttcacgcgccccttgccacacacggcaatcgggcccgtgcctgagaatatttccacaggcgcctttgcacggcaacgccctcgcgcgcatgatttgcctttgccgtatgtccgattgggactgcgtcgccctcacccgtgatttaaaattttttttcttttttgtgaaaactatggtacgtcgcctgtatctgattccgttacgtgtaacattcattgcgaagtcatgactcgcgagcgaactgcgaaagaaagtccgtgtcgtagagtccatgtggatatcacatacgccgttgcccagattatccaattctattcatattacacgacacggttcctgggacatgttagcatgatttcaagtcactctccacacatgctcgtacgtactaccagagataccgttacaataatccagaatcagttttacttttgaaaagaacacgccaaccgaaatagagtatgatcgaagttgctgattccatccgtcatcaattcctgcccgacttgagataaagctgggcaacaaatcgagctcgtgtttgaaggcctcattgtttggcttatgcttattcctataagccaagttttaaattttagaacgtaattttaaatttgactttttggtttttttatcgtactttattttacagtatttgcttttgagtcgctaagaacttgtgtatgagagatttgcacacaaatagtcttttattttgttgtaagtgattccgataagcacatgaataaacgaaacaatggccgccgacacatgtacaaattaaattggctcaacccgttgtaatgcacgggcatcttttctagttatataatacatgaatccagcccacctcctatctatagtcggatatgcagaccgtatgggtaccgggtacccatattctccacggaagatgacaatggtggcaatttcatctcttgtgcttggactgcgataaaaagaatagttcgctgttctttctcgagaaaatccatgaaatgcaattgacaagtgtcctaatcgaagaaatgccattgacgaacgcaacttctagaaaatgccatcgtacgaattaacttctcccaaaaatgccactaccgtttggtttctgttaattccactccgttacacctatttatttttttttagaaaagcccaaagtgccctcagtacatactatacttactctatcctttatttctttttacctagtaaagacaaattcgacaaaatggaaacaacacctaaccctagccccgatctaggaggaagctgattggatcccggcggcaccgcggcgctcccgaccaatgatggcagcggtggggtgaatcctcacggcgacggcggcgtgggtctcccagccagggctacgttgggcggtggcgtgggggggggggcgaggctgcgatgctgcgctcctaggcggcggcatgggggcgcaaggaggtgctagggtggccccagacaatggtgcatgggcccgaggaggaggtagggccactccaaccggcggtggaagtgaggctggaggcggtggcgcctcactcccaggtagtgatacgggggacgcaggcgacagcactgtggtccctgaaggtggtcatctgcgatatattatccagaagtgaggaaatccaagtttctattgtcattgacaaaaattggtataggtccatttacccactgaaatgtgttgatttgtaatgattcaattatgaatatatgattattgatgtttgtaatgattttatcttgatgtgaagtcctgtttttttcaaggttcacttttttagagttctgcttgtgctgttctgagcatagtggtgttcatgtgagttcatgcctaggtatttggccattccctttagttcctgacattcaataaatttagacaaattttggtctagaactcgaaaatgagttcctatataattgtgctactattacatgtgtgtgaaaattgaaaatatcataatgtctcatttttagttttagtaagaatattacctggtgcaaatattacaagagaaaatccactctttaccaaagtatcatacaatagttttgcagatacattatgtagcattcacatggggcaaatggtcttttcaccatgtccaacggagtatagctaagggagtagtgatggtgatggcatttttgggagaggttgattcgtacgatggcatttcccggaagttgtattcatcgatggcatttcttagatatagacggttctgttttgttctaagcgagctatgctgtgttgagtctccagcgtgtagttgtatcagaacccggtatggcttcagtaaagctgggtcgtgtatgccttttgtcaaaaaaaaaaaagaagaaaagaaaagatgagttgaattgaaaagtatcatttaatagctcaaaaagtttgcatttaactttaaagtatcgagctgattcctccaaaacacaccaaaaatatggataattataactggttggctttttgcatatacctagcggccttcaatcttctttttgcagcaaagacaaagctattctttttctctttgttttttccttttattctctttcttgctcacttttgctcatgctcacgtgcccctcagtactaacttccctccgtcctctcgcaaattaagcactttcctctttcctttgcatcctggtaatctttccttactgttattgaaagaagacaagttttagcgcaaatgaactgatgggttcctccttttcatctcgtttgcaacttcctcagattcctaaattgcttgatctcagccctctgcctccttgtgcactggcatttactgtatctagcgttcctgtttcttccttttccagccccttgcaaggatctttcctgcttcctttactgaactgcttataagcatgcacatcgcactgtcgttctgtcatatccattccctcccgtggacatctccgacgagcctaggctgctgctgctgctagtatgcacaactctttctcctattgttttgttttgattgttcacatcaccctcaagtctgagagctagctgaccaatctctagttctgttcaatgctcaggggttcatcaggaaaacatgggtttgcagaggaaaatcaaaattctagccaagagaaccatccaggaggcgcaagctgtaaccctacatcccgcgaagacgaagcggccccgttcagaggaggaagaagaagcagcagcttcgacgccaacagctctctgtggaggaggaggaggacttgaaggtgctctgcactgcccaccggcgccgaagaagccgaggcttgtgatgggttgcagcctgaacgggttcaaggttctgagcgtcgtggatttgcgtttcttcctgcgttgaagcggcagctagcattgtttttgtacaggcaagagttagcatggtgcctgcttatgaatgtttgtgaacgttgacatggaacaaacagatttgctttttagtttttttgtcttttcttaacggaagctaatttcacttcttccccatctccatagctcaattggcaagttgacagtagccagtagttcttagggttccgcaaaaaatttgttcgcccaactgtttggacatgatgaaaaatcgccgatattcacgaaattcagaccatgccaaataatttttctacactggcgagtaagtacttgtttagctcagcctaaaaaggaaaaagtctatgtaccacatatacttgataaaagtttatctagcatcgtaaaaaaataggctgtgttagggaggtgaagtttggaactcacctcctgcgcacgtaaaacggaacaacgcattttctttgattaattaattgtttaataacttttttaaaaaatagattaatatgatttttttaacgtaacattcgtatagaaaatttttacaaaaaacataccatttagcagtttaaaaagcgggcgcggaaagaacactgctaactaatgtagtatgtttgcatatcgtcaatcatatagtatagtggcttttggatagtagttttgggtatttggaaccttaaatcagcagttttaaataactaatgtagcatgtttacatatcgtcaaatcacatgtgaccaatttatactccatagtattgtcatactagaattatatgggcattcttttgtaagcaattaagagcaaaaagttggggaaacagaagatttcgctgatgattttaacacatatgtccaaattccaatgcatatgtcacctagttaaactaatccaacatatatgtaaattagataaaaatcattttgtaaaaactacactagggtgcaatataaacgatattatatagtagttcggagggctggatatctcatttcaaagttcaagctgctagatagactttcaataaaaaaatatgtgtagggatgaaaatagattgaatctattatgaaacaagatatatgatctcatccatatatatggatggatcggcaaccaactccggggcacggtggtgccccacgtcttcaggccctcacgcactcctgccaacatgcctctctcccccatatatattgtaaaccccgtgatcaatgaggctcaatctctcttactatttggaacattgagtttgagaggagagaagagaagattgagaagatacgtaaaacgaggtgagccattagcgcataattaattaaatataaattattttaaaaattaaaactgtatcaatatgattttttgaaacaactttcatatagaaatttttttttaaaaaaacacaccatttagtaatttggaaaacgtgctcgcggaaaacgaaataactttcacacaatgtgctgctgccgaacgttaaggagatatcctgaggtcgagagttctggcttctctcgcccccaagttaattttccagaaaagggaaaaacctgatatttttgtaaaaaaacagaggaaagaacctttctctacccgagaaatccaacgctgtcttgtcacttttcaaatttgatctctcttcaagcacacgcactttcatttgtaggacatttggcgagactcccacatcaacaaagaatcggttatgcctggtggctgaaccatactgtaaccattgcgataccagcagcccagttctcagcgtgccttgtagtccatacaagcataatgatcacactgactgaactgtatccactgggcagaagattacggcccgggttagagcccaccctaaaattttacatcctatcacatggaacgtttgaacatcagcatgaagtattaaatagaggataaaacaataattaattgacagattgtgactaatttgtgagatgaatcttttaagtctaattgctccatgatttgacaatgtggtgctacagtaaacatttgctaatgacggattaattaggcttaataaattcgactcgcgatttactgacggattatgtaattagtttttttattagtgcccgaacaccccatgcaacaccctatataatacccgatgtgacacgccaaaactttacacccctggatgtaaacacccccaagatctaaacaccccctacattgtttgtgtgttcagttgtttccatgtgaaagcagggaaaataaattctcgttcaccttttatgccaagttgccaacactacttaaaaaaaaccctcatacataccagctcataataccaacacctattaaaccctcatacataccagctcataataccaacacctattgaccgttctcacctccatgggaagaaaaaaaatacaaaaccaacacctttcaacaactataataatatattgtaggtatcggttcttagagaaccgacacctcaaaaaacctgaaacgagccactacttaaccccaccaagtcctcgcgcatctgctccatccttatcctctctctctctctctctctcatcctctcctccctttgcgccacatccatctccaccgcccatcactgcatctagcgtcgccgcccgtcgtgccactggatctaacggcggcaacctcggtgcggagaggaaccctggtggagacctcggcgcagagagggaccccaacgatgacctccacatcgctcctccgacggtgacacaaattggcaacgacagtgggaccggggagagtgagttcatcttgcttgtgtagttcttgatcttgtgttgttgttgatctatgatctgtgatatgtgaaagatggggtgaggatttttgttgttgatctgtgatggatgggaatgagaattgtttgttgatttgtgatttgtgaaggatgggattaggggttgcttgaaggggcggctccaaagcatctcctcatcaagccgagccgatggttggagccagcttctccttttttctttgaaatggggagagcacaaaggtgccagttctacaacggcaccaatgaaatggggagagcacaaaggtgccagttctacaacggcaccaatgacttagcatcattggtgtcagttgcgaaaccggcatgtatgccaagtttgcaaccaggtgttctgcagtagtgcaaccaagatcgagttcatgtgctagcaaaaaagtaacgatactttgaaacggaggattgagaaaacacgtgaatagaaaaaaaatgaggagtagaatgccacactttttagattcctatagtgtttcgaaacactgaaaggtttaaaattgttgtttgaatgctcacatgacaaacacaataattctatacacatgaagaagaaacaccagaggtaagacctcatgcgtaatttcctcaaaaatgttctagaatgatccattccataggatttttaaaggaataggtagaaaataatcattttgtttcgaaaggatccattctcatatgaaattctctggaattcctatgatatgaaattctctggaattcctatgattttgctctgtttcggaggggcctaaatatctagccaatggtgattttggttgcacattagataaggatttactcccaacgaactgataatacttgtcattttagagaagggttagatcaaactttagaatcattgattatgaattatttttaaaatatttatctttcaaatatggtgactatatgtatagattagttttaaaaagtactttcataaaatcatatatttgttaacaattttatacatattataataaaaaataatgatcaaagttatttttttgaagaccgtgcccttatctaaacgacaagtattatcaatccggaggaaatagttattttgatgtggattagttaatcattcgtggtgcgtgaatcatgtttgatctgtttttttatttatgtagggccctccatggtaactactactccaccgtgtttatattactagtgtcatgcacatgttttatagggttctgtcttttatatcttgtgttttggtgggttgttttttttggatgggctggttttttcgggtagtttttttatgtggggactacaatagtggggacgaggacaatgcctcttctttcaaaggtaaaagaataatcgaatattgagcaatcaaattcagttagtagagataagtcatttagggtttatcctaatacaaactttttaaatttaatcatgtttatttgtagaaaagttagtagcatttacaacacaaaagaaatatactaaggaaatatatttacgatgaatttaataatattaacttggtattatcgatgctactatatttttgtataaagttagttaaaaatgaaaagtttaacttagagataacctaaaacttcttaggctgagtttgtttgggtgatagggagtgagatgcttcgctacttaattaggtaacattaggcggttttacaactctagactttgggatattcatatcacctggacactttggaattgttggagtattgtggaattggattcacaccgccccctctattcaaaatccccaaaatggttttaggctgggctcggggtgcatggttttgatagtagcacctcggccatataaggaccggtcttcgggcctctgttgcaaagcactaccgtacttccacatgtctagtgggtaaggcttactttgtggctcagtctggttataaacaaaagtacacggatggagatggacgaagtcgggggtcgatggacatctccagggcaaatgaaggctacacgagctgcggcccggtagtcgagatgtcgtggcacagggccggtgtcctgctgctaggggctcagtcctgcctgcctgtcccgggggttccggccgtaggtgggattgggtcggtactcttgtctatggctaggatgggttggaaactatgtcatgtcttccgtccgtataccatggtggtatgtggcacgtggttacacgtgaggaagatgtgtcttgtgggtaaagatgtacacctctaatcagagtataatctattcgaatagccgcgccctcggttatgggcaagccgagcaatgtacccaaattagtgttttaattctaaaaacctgcttaacaactaaaatgtggaatggttggcctgggttggcttgggacgagctgggacccagggtcgggttgccggttcggtctgaatcatcgtaggccttgggttaaggcaggttcgtgtgggttcatggccttgataaataatattgcatagttctagaatcgtgtttacaaaatagctttgagcaactaagcatctttaaatgctgtttactgcaaccctaaccctttatattataactcccttgtactcccttgcatttattatgcacttgtgggtgtgtcttgttgagtacggtggttgtactcagtcttgctcaatttttcccaacccagaagaggagcccctggttgatgaaggctttggtgtctagctcgtgcctgccgtcaagcgcctgtggtcgtcgccctagtcttccgctgtttctcgtttgtctttgtgtgtgctgggccttcgtcgcccatgtaataaattatctatttacgcttccgcttgttaaactctgaattgtatcaactcttggtgtaccttgcctcctgggacaaggaataatacacgcacgaaaggaacgcccgttgggttaattccggtcgtgacaagttggtatcagagcccccttgaccctaggacgagccgtagatcccaagccttagcaatatcatcaaaaataaaaatcctttgctaattgtgaaaactctctagtctctctctgtcctgctgcttcatttatcgccaaaatctgacttttaaatgttgcttttctttttgtttttgtttgtagatggccggcagcgttagtcgtcgtggtctggacatgactggtttcgtcttggagctgcggggtatgtgcgttgtcctggggtatccgcatggagtggactaccagggcaggccgctcccggagcaggagggtgacgatgcagagccccacgctgcttgggaggttactgcagtgatcctcactggctcacccgagcggacttcgttggcagtcaccgcgggtggagattctttctccgccgcttgccagagcgtcgctctcctcgccatcggcactcttcactagcgctacccggacgagctgcagcactcgccctaccgctaccaccctcgtcgcggaggagcccgcgactacgccaccttctgggatgctagctcagaggatgacgctaccatcatgcacctggcgcgcatggtggaggcgtacgacgcggctcgtatcgacttccatcagatggtgcgccgtgggatggtcgagaacgacctgaagatcctggagctgcgtcaggagaatctgcagctgaagaaggacctagacgcagtggaggcacagctgcatcagctcaagatcacccagggagaggtctgtcgccccaagcgtcgccgcgtctgccgcagccagaagatcaccgcccgcaagagcacctccaggcccgagcttgttcgtcagtccctggcgtggacttgcttcgtggagacccctcgtgccgagcccgcgcccgtggttcctcaggagggggaagcctccggcgtcggtagcacggaggatgcgctgttgctcaccttccgtcctggcccgtcgcagtggtagacgagcagttagtaggcttgcacgtgtgttctttctcgtttgtcttcttattggggtcttgtggagcatggttatgccggtgtgtggcataactgtgtcggagcctgtctttattttatttgcttaagcaacttgaactttaatgaaccaatttaatagcagtaataaattcaagagttatggtagtcgtggatggttagctttaattgtcagctctctctgtttgctggttctgtgtggggttttcagatggtgacgaccaggagaaatgctgccaccagtgatggcaaccaacctgaaggcagcaaccacaacaaccatggcagcccacctccacctcctccaccgcctccaccaccaccaccagacaccaacgccattctcacccaaatcctcgcccagcaggccaacatgatggctgctttcctccaccacatccaaaatccgccacaacataatgctccaccaccacccccacaacactctaaactcgccgagttcctacgcatccgtccacctaccttctctagctccaacaaccccgtggatgcgttggattggttgcatgccgtggggaaaaagctagacactgtgcagtgcagcgatgaggagaaagtcgtcttcgccgcccaccaactgcagggacccgcatctctatggtgggatcatttccaggctacgcagccagaggggcagcctattacttgggcccgcttcaccgccgccttccggaggacccatgtgcccgccggagtcatggcccttaagaaaagggagttccgagagttgaagcaaggcaaccgctccgtgatggagtatttgcatgagtttaacaacttggcccggtacgccccggaggatgtgcgggaagatgaggagaagcaagagaagttcttggcaggaatggacccggagctgtctgtccgtctagtctccggtgactatccggatttccaacgtctggtggaaaagagcatccgcttggaagccaagcacaaggaactggagtcgcacaagcgtcgcttggcgaatttccgcaaccaacagggtgctaaccaaaggatccgctacaccaatccctatccagggggatcttcctcgcagcagcagcaacctcgctccgcgcctcgacctcaattcgtggtgcgcgtcccacagccgcagcaacagcagagccagcaagggacccgtgcgccccgtcctcctacgccagccgcgcagtctggacaaggccgcagggacgttcaaggtccgcagcgtctgtgcttcaactgcttcgagcccgggcactttgcggataaatgcccgaagccgaggcgccagcaaggccaagcgcctccccgctccaacaacggtggtaaggatgtcattcggggtcgtgtgaaccacgtgacggccgaggacgtgctgacaactccagacgtcatcgttggtacgttcctcatccattccatccctgctaccattttgttcgactctggagcttcccacttgtttatatctgtgccattcgtggggagaaatcagttgggggtagaaaggcttaggaaccctctactcatcaccacccctggaggggttatgacagcaaagtattatagtcctgccgtccctatagaaattcaggggattccttttccctcggatctgattcttctagacaccaagaacttggatgtgatccttgggatgaattggttggctcaattccaaggagtagtggattgtgcaagacgcactgtcactctgtaccgagggccggaacaaccggttgttttctttgcacccccaacctctgtcagtagttcagaacttcatcagataggactgtcagaaatccccattgtcagagagttcggagacgtgtttccggaagaactacccggtatgccgcccaagcgagagattgagttccggatagatcttgctctaggaaccactcctctgtacaagcgaccctaccgtatggcagcaaatgaactggccgaagttaagaaacagttggaagagttgaaagaaaaggggtatatacgtccgagtacttcctcctggggtgctcctgtgatttttgtggagaagaaagacaagacgaagaggatgtgcgttcactacagagctctcaatgaagtcaccatcaaaaacaagtaccctcttccccggatcgatgatctgttcgatcagcttaaaggtgccacggtattctccaagattgatcttcgttctggatatcaccagttgcgcatccgtgaagaagatattccgaagaccgcattcaccacgcgatacggactgtatgaattcacggtgatgtcgttcggtttaaccaatgctcctgccttcttcatgaacttaatgaacaaagtgttcatggaatacttggataagtttgttgtggttttcattgatgacattctggtatactcacaatcagaggaagaccatcagcaccatctccgtctggtgttgggaaagttgcgggaacatcaattgtatgccaaacttagcaagtgtgagttctggttgtccgaagtcaaattcttagggcacgtgatatccgctaaaggagttgctgtggatcccgaaacagtgaccgccgtcaccgattagaagcaacccaagacagtcactcaaattcgcagtttcttaggtttggcaggatactaccggaggttcatcgagaacttctccaaaatcgctcgacccatgacacagttgttgaagaaagaggagaaatttgtgtggagcccgcaatgcgagaaggcgttcaaaactctcaaagaaaagctggtttcctcgccagtgttaatcttgccggatactcgcaaggacttcatggtgtattgtgacgcttcgcgccaaggattggggtgcgtgctcatgcaggacggtcatgtggtggcctatgcctcacgccagctacggcctcatgaaggcaactaccctacccatgatttggagttagccgcggtggttcatgctctaaaaatctggcggcactatctcattgggaatcgctgtgaaatatatactgatcataagagtttgaaatacatcttcacccagtcggatctgaatcttcggcagaggagatggttagaactcatcaagaattatgatgtgggaattcactatcatcctggtaaggccaacgtggtcgccgacgctctaagtcgaaaaagccattgcaacactcttaacgtccgtggcattccacccgaacttaatcaacagatggaagccctgaatctaagcatagtgggtcgcggattcttggctgcgttggaagccaagcccaccttgctcgatcaaatccgcgaggctcagaagaacgatccggacatgcatggactcctcaagaatatgaaacagggtaaagccgctggtttcacagaggatgaacacggaaccctatggaacagaaatcgggtatgcgttccagataacagagaacttaaacagctgatacttcaggaagctcacgaaagtccttattccatccaccctggcagtacgaagatgtacttagacttgaaggagaaatactggtgggttagtatgaagcgggaaattgcagagttcgtggccctttgtgatgtgtgccagcgtgtcaaggcagagcaccaacgaccggccggacttctccaacctctccaagtaccagaatggaaatgggatgaaattgggatggatttcatcaccggacttccaaaaacccaaggtggatatgattctatatgggtagttgtggatcgattaaccaaggtagctcgatttattcctgtgaaggccacctatggagggaacaaactagccgagctctacttcgctaggatcgtgagtctccatggcgttcctaagaaaattgtatccgataggggaagccaattcacctctcacttttggaagaagctccaagaagagctgggtacccgattaaatttcagcaccgcgtatcacccgcagacagatggacagaccgagcgtctaaatcagatcctagaagatatgcttcgcgcatgtgtcctagatttcgggaagacctgggataagagtctcccctatgccgagttctcctacaataacagctaccaagccagcatacaaatggcaccttatgaagcgttgtatgggcgcaaatgccggacaccgctattgtgggaccaagttggggaaagccaagtgttcgggaccgatatcctgagagaagctgaagctaaagtcagaaccattcgggataatctaaaggtggcccggtctcggcagaagagttatgcagacaaccgacgccgtgacctagaattcgcagtggatgactttgtgtatcttcgggtcacgcccttgcgaggtgtacacaggtttcagacaaaggggaagctcgcacctcggtttgtgggtcctttccgtatcattgctcggcgcggagaagtcgcttaccagttggagctgcccgcctccttgggcaacgtgcatgatgtgttccatgtgtcgcaactcaagaaatgtcttcgagtgccatccgagcaggccgactcagagcaaattgaagttcgcgaagacttgacctacgtggagaggccagtgaaaatcctggacaccatggagcgaaggaccaggaaccgggtaatccgtttttgcaaggtccaatggagcaaccacgccgaggaagaagctacttgggagcgtgaagacgagctgaaggcagcccatcccgatctcttcgtcagttcttccgaatctcggggtcgagattccgtttaaggggggtaggtttgtcgcgtcccaaaatgactctaaaatacatcctcgaaattatgcctagaataattaaaatccttgtgaaagcctcccacaattaaaatgtgcaaagttaaaagtccaataaggcttggaggatttttgtatatttcctaaaagcctaaaatgcgtaaataaattttagtggaattttcagagcacaaataataattattaagaaataaacaaagttaaaatgattttataaaaagaaaaatcctaaaaagtctttccccccctccccctcttgggccggctcagcccatctccttccctctctctcctcctccccgcggcccattcggcctcctccccgcgcgcgcgccgctgacgagcgggcccgcccgccacccacgctgacgggtggggcccacccgtcatccccttcctcccgccgctcccgccgcctcgcccgtgccctagcgccgccgccgccgcaaatcccgccgctcccgtccgccccgcgtgcaatcaagaggggggaaatattccccgtgattccctccctctttccccccatttttccctccctctctccctcggattcgttcggaatctttccccctaaacctcgccggcgcatcaatggcggccggatcttccgcgcccgtttccccctcatccggccgccctctctcactcccaaccctatataaacactccccgtgcctccctccaccgtttccgccactcgccgctctctctctctccgccggaatcgagctcgcgtcgtcgctctctctctccgccgtcaccgccgagctccggtctgccgccgtcgtcgccccggaccttctcccgcttcggcgccgcctccttcggtttcgccgcaacctcgccgacctcgtccacccctccgtttcgcccgccgaccgccggaacgccgccgtccccgtctacccgagccgcgccgccgccttcctccgctccggtcgccgttcccgtcgtcgccgtcgacccggggtgagctgtggaccgccgattcgtttcccccttccctcccctctctcgggcgccgctccgccgcgccggtggtcgccggcggcgaccatcggggcgcgggtgcgccgcctcccgtcggctgtgccggcgtggccaccttcgggcgcgccccgcggctgccatgtggggcccggccgtcagccgcccgcgccctcgggtgcggctgacgcgtgggacccacggcgccggccggtgtgagccgggagcacccggtccaccgtggaccgtgaggctgccgcgtgggccccactcccgtggacccggtccgcgcgcccctcccctcggctgacgcaatagatccaaattttaaattaaaatttaaatgaagaaattcgcaaatattcatttaaagagcatataaccttcaaatggccataacttggccatttgaactcggaattggaccgttcaagtctctaatttttccttaagaagtcaagaacccatttttgtgctttgtttctgcttgttatatggagtttattagagtaaaagccttttcttttccgttggtcgtgtagacgctgcagcttcggaagatccgctcttcgtggaggttgaagccgacgtttgggaaagtgagcaaggcaagtcacatcatctttgaacatattgaatcccagtttataaaattatgttgatttaaattattgcattatcgctttatttaaattcccgcgttatcactgttttgtttagccatgcctatttacctttgttatgaccttattattgttattgttattatttccttgttcaccctagattaaacaaaaccccaactagtggacactctactcatggtaccactagtatgatgttaggtagatgcttcgctatttaattaggtaacattaggcggttttacaactctagactttgggatattcatatcacctggacactttggaattgttggagtattgtggaattggattcacaccgccccctctattcaaaatccccaaaatggttttaggctgggctcggggtgcatggttttgatagtagcacctcggccatataaggaccggtcttcgggcctctgttgcaaagcactaccgtacttccacatgtctagtgggtaaggcttagtttgtggctcagtctggttataaacaaaagtacacggatggagatggacgaagtcgggggtcgatggacatctccagggcaaatgaaggctacacgagctgcggcccggtagtcgagatgtcgtggcacagggccggtgtcctgctgctaggggctcagtcctgcctgcctgtcctgggggttccggccgtaggtgggattgggtcggtactcttgtctatggctaggatgggttggaaactatatcatgtcttccgtccgtataccatggtggtatgtggcacgtggttacacgtgaggaagatgtgtcttgtgggtaaagatgtacacctctgatcagagtataatctattcgaatagccgcgccctcggttatgggcaagccgagcaatgtacccaagttagtgttttaattcttaaaacctgcttaacaactaaaatgtggaatggttggcctgggttggcttgggacgagctgggacccagggtcgggttgccggttcggtctgaatcatcgtaggccttgggttaaggcaggttcgtgtgggtttacggccttgataaataatattgcatagttctagaatcgtgtttacaaaatagctttgagcaactaagcatctttaaatgctgtttactgcaaccctaaccctttatattataactcccttgtactcccttgcatttattatgcacttgtgggtgtgtcttgttgagtacggtggttgtactcagtcttgctcaatttttcccaacccagaagaggagcccctggttgatgaaggctttggtgtctagctcgtgcctgctgtcaagcgcctgtggtcgtcgccctagtcttccgctgtttctcgtttgtctttatgtgtgctgggccttcgtcgcccatgtaataaattatctatttacgcttccgcttgttaaactctgaattgtatcaactcttggtgtaccttgcctcctgggacaaggaataatacacgcacaaaagaaacgcccgttgggttaattccggtcgtgacattttggggatattctacaccccaatttttgtagtgcattctagctttttatctctgttgcatcaataggactttgcacagacactcatatatcatcttctagctaccgtcctattgataaaagtcaggataggatgaactcgttatcttggcgttatcatttggccaccatttgtgcgagtatgataatgaataagtacctgtgtttgatggtatatgttcacgagtggctaaacgaaaggcatctattttgctccctttatttaacctaaaatattccttaaaaaattatgtggttatatgtttgaatggaatatctcttaatatgccttaacatacccatgtaagtaacacgtttccgccactaattaaaccctatgtaagtaccattactagcttgtttaaacaaatattaatttacttgtacgcttgcatatacgtgcatttgatagtggtgtagagctcctaggctcctagcactgtactatcgagttgattttcctcgtcggcgtattccataaggcacattgtcggtgtatgtaactgtgcgtggaataccttttaggatgacaagggtacactttttacattgccctgatcgttttgacgaattggccagcatgaatgtcctgttgtgtgttgatgcttcactgcacaacaactgccccacatgcttgacgcccggatggccgtattcagaagcaaaaataaattaaattaaattgtctcgaggtgtgctcctctgtgtccagttctttttcgtgccctctctgatgtaatgtaccaattagtacctagttaatcatgaatacgtgccagctcgaccaacaaagctagctcctgtgaggcaaaaagtgaactatacgttggcatatatcatggctgcccaaagagcacagtactatatgtcatgtgtacgccatagtttgctaatgccacatatttgatgccaatactccatccagcttgctgtccttcacggtgcatgtacacggttgtggcttatttcgtttgctcatcaacatggtttaatttgcagttttgcacaaagtagcaaatattatgtttttttccttgtatttcttataaaacctaaaaaaaatttcagagctttttatttttttaattttattaatagatcttccacgccaccgtagctagcatggccaaccaacgctgctacgccagttcggtttttaaaaataatttttggaaagatttattaataaaattagaaaataaaaagaaaataaaaaaaattataaaacctcctgccttttcccacacatatgtcacactgaaaaccagacagcggtgagagagggggggagtggaagagaagcaagcgcgagacaaggcggacaggaggcgtggcttttttgtgcggtccgtcacacacacaaacacacgcgctgtcgcttttctcggagaggcaggatttgcaagggtggttagggcaagtactataaggttttaagcacaaactccaaagtgccatgtatgcttaaataatgatgtggaggagagaaaagaagagagaggggaggagccacccctcatgcaaagggcaacctctacacaaattttaaggaacaagagaaaataaaaggactgattggtggcaagtgtattgagactagtgtattaaatgcaatgcatttacataagttaattttgattttttggatggatgatgtgaataaaattggaggtgaccaccacatttattataaaacttgccctttgaggacgaggcggcaacagctgcaaacccaagtaaagccagccagcctacccatgccacaccagtacaccacagaatgtgatggtgattgtgatctttcacagtaaaaaagaaaaaaaggaagatctgttcttgaagccaaacagcgattgctggttttgctggtgttggcgatgagattctattattccccttgcccctagtgggcgatcaacaccgacacccactgcactgcccctcccctccattcttttcttttcttcaacccaccgcgcgctccaattcggaagctcggggagcagcaggcagaagcaatggcgggctcgtccaggctcaagtaagtgtgccaatccggcatcaatctctcatcttctttacccgcaattgtttggctgcctttttggttccatttgacttagttcttggtctgagcaaaataagatttgttggacacatgctgcagttctagcacggccgacgctgccaaaagcagcaagagcacgccacatgtggccgccaccgctaggccggtggcctgtggcatcccacgtcatgcggcggcgcgtgccgagaggtccccggcgttggtggagaagacgccgtcgccgtcgtcagccgaccaccgctcgcccaagatctcctcccggatcagtacactgccttctgccgaggtacggtccattgatcatctttactgcttgcttagattcttgagagatgtttgtttggttgtaaattttttttgagcgactcctgtcctgcgcccactggaattgaattgaattgctggctgcagaagcacaggactgccgtgaagaagcagtccatggaacagctcgcggcgatccaggaggatctcaggagggcaaaggaacagctggcaaagaaggagacggagcatcgtaaggtcgccgacgacgccaggaggacggccgatgaggccaatgccaagctccggtacgccctcgccgagctcaagaaggcggaggaagcctccgagaccgagatgttccgagccatcgagctggagcagactaccatcgagtccacgcagaggaaggatgagctccagcggaggctggaggcaacgcggcgccagcaggaggccgacgccgcggcgctgcggtccatggtagcgcagctggaggaggcgaggctagaactggctgacgctattgacgccaagaacctggcgctcagccacgccgatgacgccatcagagccggcgaggcgaacgccgcccaggtggagctcctcaacgcggaaatcaaccgactcaaggattcgtttaattctgagctagagagcaaggtaaaagaatccgctgagaaaaccaggaagctggaggccgagacgtcggtactaaggatcaagctcaagaaagccaaggttgccgaagagaaggtggctgaattggaaggtgccgttgaaggtctcagagctgatgttgccaatgccatcaaggccaggagagaagcagatggattggttggtgaatggaagaagaaggctcaactttttgagatcaaactggagctagccaaccagtccagcatcctcaaggctgaatccatgagttcggtgatgaaggaattggatgcggcgaatgctttgttgcaggtaaaagagtctcaaattgctcttcttcacgacaagatagagtccttggaacatgaagtggtgaggcagaatgaagatatcaatgcatcaggtcagcgcgtcgatgccgcgcagagaggagcattagccttaaggacagagatccaggagcttaggtcaaggcttggcgcgatggaacaagagaagaggggtactatcaaggatggaagctttacaagctcccaaattgaggccatatgtgaagagaaggataagctagctaaggaactagaatctagcaaatatgaatgcgagaaagttagaaaagcaatggaggatatggcctctgcattgcaagagatgtctgctgaggcaagagagtcacaggagaattacctgcacaaagaaaaagagatcgagcacaccagggcaaaattacaagagctcaacatcagcctcaacaacaccagggataactatgaggtaatgcttgatgaagcaaactacgagaggatctgcttgaagaataaggtggaacagctggaagcagaagccaagaccacatctgaggagtggcgatccaaagagcttagctttgttagctctatcacaaaatcagaagaagagatcatgtcaatgagaactcggttgggtaaagcactagagacggcaagagacatggagaacagaaatgctcaactagaggagaaggtaagagaactggaagctctgatggacaaggataataattacagaggaggcaaagacacaaaagcgtacaaagagaatgatggcctgcatctgcatgtcaaagaatcatctggttcagagaaaatcaaggacttgtattctctgataggaaatgacgagggaaacacggagaaagatgggccagttttgctagtttctaagatgtgggagaacagctacaacttatctaaggagagggacgacggtgaaccggaagttgatctgttggacacagacagagacattgctgctgatggcaatggcagtaggttgtccacagagaagaccaacagtaacaccaaattggtagtcaagcagaaccagcaaaagaaggctttgatgaagaaattcggtggcttactgaaaaagaaaagccaacattaggtaatccttatcaaataaaaggaaaaaattgcttgatctataacacatatgactgttttatctcgtttatatattattacgtcctgctgacgtggcagtggagatgataactgtaagcttaagagggaagagaaaactgaagggtggtatatttcctttccctttttcgggttaatttcttacgttgtgtatttgtgagaagtatttatgctctagttttgttttctgactggttctctagtttttgtatctatatgtatgctgcggttatatgaatgtaaaggaatatgaggttgcacttgggttgttctccaatacatttcacaacctatgtatatgcatcatgcgtgcatagaacaccaaccaagcaaggggtatcaactattggtgtgtactttctactccctctatatcacaaaatagaagtattccttgtatccagtgacaattttattaatggaaaaaatattattggtggtgagtggtaagtaatattgaatttaatttgctgataagggtagataggattgtaggaatttatcgaactattcttgagaaagtttaaatcctagagatcaactaattttagaatggagggagcatatcgtatatagttctaacagattgcgcatcaactgacagcgtatcagctgaaaatagagtcggagtttgattgagccgatatggaaagcagccgatacagttagacttgggttcggtttgggccacgagataaccaatattgcgatataaagatggaactcatttaaggcaaatgtatctattaattaggatattaatgacagtttgaatttgagatatggtaagagtccatcgtatggacttatttgttgtttttatccatgggaaagtttgagtcaagcccataatggacaagttttgtacttggggtatgaatataaactctagatcattgtaataagggacgagaatccaatcaatacaactttcggcgcatcgccacttttttttttactttttcgatgagttctggcttcgagtcgggtattggctgcgatatctcgacaagaggtaacttgtcttgatggcttgcactatcagggctattatgtcgattttagcctttttaccgtggtcatcatttatcatatatcttagttaatctagtttagtatttcgatttagtcatatcggctgattctcactttagggtttatgctggtataagctaaattgctttactgtattagattagctaacgtatttaccatcctaacaagtggttaatttcttgattgtttagactttaggtttcttaacatactttgagttgcaacaaccctagtcttgtctcgaaccctataaactagcctggaattaatcataactaaggatagcatcggagtttcagctgatcttacctaatatacataataatgcatatttcataatctgttttatctatatttgccacttatatagatagatcactctgtataaatatatcaagtctgattgatctcaactaatctattatatctggtgatagattattatttgatacatttatctagattaacctgtttatataagtttgtattggattattatatattctcgctctaaatattggatcattggctatttctataatgctatctaaaagtgattgataaaaacaaaagacatagtattacagccgataggacatattcagactttttgctttacgtatccatctcaaaaccgcaaccgatttgatttaacttatcggctgggtcttgatgatacgttatcggctctattggccgatcgggtatcgttcatctaattacgtttattgtctttcttgatacttgaggcaagccttgaaccagcataggagtgaaagaaatctcccagaccgttgtgtttctcatcaacactcttttagcgcgcccggtgggaccacttcaccattcatcatgccgccatctctcattgaaatcaccgacgacaacatcatccccgtcactattgagcacttgtctgatgaaaagaaagcagagagaagcttgttcaacatatgcagcggatgtatctcagttcttatagtatgactcggcaagggaagctgattcagaagaataaagtcgagttcccaaagcttgttgaagaaaagatagataagaagtctgaaggtgatggagataaagaagaatacaagccaactctggaaggtcacattgacttagctgtgcatcatgcatttgattaattaatctggtgtgctagtcaatacattgacgggtatgatcagatcagtggtagatacgaccattgctgaggagaaagctaagggcccagtataatttctaaaggaaaaagtacgaattacccccctaaactattgcggtagtccgaattaccccctaactacaaaaccggacattcttcacccctaactatgcaaaccggatgaattaccccccttgatccaatccacggtggttttgatctacgtggcgtacgcatggcagtccagtcagcaatttatttatttaaaaaatgtgggacccacctatcatactcctattccactattcccccctctctctcttctctttcactcttcctctctctctcctctctctctctatctcacgcgcacagcagcaggcgggcggcgagcggcggcggcgggggatgaggcgatgagcggtggtgggtgcggaggcggcggcggcggaggaggcgagcggcggcgggagctcgcgctgctcaagcgaggcgaggcggcagcggcggaggaggcgagcggcaggggatgaggcggcgagcggtggcagggtgcaacagaggaggcgaggcgaggcggtggcggcaacgggagctcacgctgctcgagcgaggcgaggcggcgacggtggaggaggcgagcggcgagggatgaggcagtgagcgtcggcggatgaggtggcaagcggtgactgggtgcggtggaggcgaggcgaggcggcggcggcgacggcggcggaggaggcgaccccgcgaccaccgatccggcggaggcgggcactcgcctcgcaccaacgcctccacgctccacttccgcctcacccaccgcgagcacttcgcgctcaacgccaccgcttccgatgtgctcgcgcaccttctcgcccgggacaccgcgcgcgccgccctgcttgctgcacccaacaatgccacgcgcccgcgctgccgcggcggcttcgtggcgcccctgctgtccgacctgctgcaggggagcagggagctccagctccacgagcaccacaggcaccacgggcacgtccaccgcccgcccccatgcgtcgcgcccgtagccgccaccgtagtcgccttcgctcggccgtcgccgcgacgccgccgtccgccgcccgccctcgtgcacacctgtagacaaagagagattgaggggaagaggggaagagagagagagattgagaggaaagtaggaaagagagaggtgggagagtatgacagacgggtcccaccattttttattaaaaaaacgctggctgggatgccacgtgtacgccacgtagaccaaaaccactgcggattaggttgaggggggtaattcgtccagtttgtatagttgggggcgaagaatgtccggttttgtggttaggggtggtaattcggacgaccgcgatagttcagggggtaattcgtactttttctatttccaaatcatatttttcccacagtacaggaatgtaaaaactgatctaggtaggctgggaggagaagaggagggagtgggctggcccggaaggagggcaaaaagggaggaaggaagaagagggagaggaagaggacttcggccgggggtcgagggacagaggggaagactctgtgccagacttggcctaaatgaaggagatggattatttttaggtttttcttttttaatatgaactctgaaaattgtttttgttgcttaataaatatttctgacgctctgaaaattcaaataaaatttgagggctccttttagaccatggataatttaacaaaaatactccgggacacattcagatttttcatgtacgagttttgatgtttgtcaatttctttttgagttttaattaattctattattccttttggagaatgatttttaattgggatgaatttatcaagacgtgatagattctttgcatatttttagaataaaaatgtaaattttagacttgggtggcaagtgatatgcatatggtggtagttgcataccgataggggggagtgtttgtctgagtcaatttaggaccgaactacatgtcacccacttatgtatactgtactattcctccctccaaaaccgcgtagctagcccatccaacgagcggacccacttacacataccacttcacttatacttttgtgctcgcttggtgtaaaagggttaacccgggagtgatatggttggagggacaagcccttataagttggttcaactcttgctaaactagcaaggactaaacgtgctgtgtgtggcctagatctggcgcacgcggagtgacgtgaagtcgccatgctggtgtgttgaacacgttgtcccttgttggcatgtaagggaagtgtcccgacctagatgcttcctgggtggggtgaacatgaggcggaatttggaatacctagggacgtggttgtgccgtggggacgtggttgtgccgtgctcatcgggggtacccctgatctagctgaccccctggtgtactccggtgctggggtgtgttgaaaggaaggacgactgtgagatggttgtgctgcttcgtacccgcggcatgacgaggagggaccactgtgatccacgctggaatgtcggggtagtggtggtgatgccctacgggccgacggctgcaccacatctgccgcgctccgacaggagacacgacgaagtagtgcggcagcacgggcacggaagttgcgaaggatgctcgccacgtcgtcaggcctgacggctggaggtcttgacggttggaggtctcgtctctagtctttgcagcaaggtgtccgactcgacttgcacgtgctcaacaaattttgcatgttccacaaataagcaagacaattaaaattatgatatagttgcacatttattcaaagtattgaataagttgcacatttattacgaatattgaccaagttgcacatttataaaaaatacttaactagcacatttattaaaaatattgaactagttccacatttattagaaatactgaactagttgctcatattccgcatgttccacaagtaaacacataccattgagttgtaagctgatcgaggctgaggggcaaacgtgtcagtaatcgctgcctggtgggggacggtgctatctccttgtggcggaaaacacctccatcgtgtgacactgcggtatcaacgaaggtaggccccatagtaactcccatcgtctggaggtttctgaagcgccaaattatcaactgcgtgctcccactcttgtacagtcggctgaaccatggtcacaataacaagctcgtaggaaagcccgagcccctttcgggaatacctgcacagcaagaaatggacacatttattcaaaatcgtacgtacacatatttttgttaaaaattggattaaacaactgttatgtgtaccaacctctgaagactatcagccaaagcatgaccaactctgggagaaaagtcctgatacatgcccaactgtttaagaaccctttggacattgtgtggctcgacgtgcacgtccagcacgaggtgacaagtcgtcctccatagtgcttgatcccgcgtgcaaaggtccgcgagaccgtgcggtgcacgatcattgacatcgtgttgagtgtacggagtctaccgcacacggtcaggcgtaagctgatcaaagttagctacgaactgtgtgtacacacgacgcgtcgtcccgctaacccacttcggctgtaacaagaagatagtacttatgattagttatatcaggaaattattcaacttgtggtgaaccgtatataatgagaagacaaacgaattaaacaaaaattacctcacagtgtgtccacaaggatcccatagtgggacgattgtcgaggtcaccaaccccggacttgtacatctctcgcaattcgtagtttgcgtacgagtccagctgaggcctcccaatgtcgaagcgctcgtgcgcccacaacatgagtagcaacgggcatccagggagtgaatttgcttgctgttcctcaagcaagcatcacatagtccagcatatgtggccgcaagtaccgccgacccccaactgtactgtggaaactctgcgataggtaactctgcaatctgctccgcgtagtggatgaagtgcttgtccaccgagtcagtgtgagttcctgtgaacatcacccatccaaacaaccacaacaggtaagcgactaagtgccgtcgcacgatccagtcctcctgatcatcaggaaagacatcatgtcgaaactgattcaaccaactttttgtcggcccgtgcccatccatgagatcctccagtgcaacaggcagcacaccaccaaaattggccagaaggtcgtctgcccatccagcttgtaccattgttgggccaactgctggcccagctatcggcagacccaacagataagacacatcctgcaaagtgggcaccatctctccaactgtgaggtggaaagtgtgggtctcaagcctccatctatccacgagagcactcagaagcgccgcgtgaaggctcgaccaatcgtgcaaaggtcaacaagccagctgctctcaacctacaagaagagagagtgcaagttattaatacagggaaatgtcaaaatcttataaggttaaaacaatatattattacgcaccttggaacccaacgaggatcaatacgccaatattgatccggtcctcgcattttcagcacattgcagaaagttcctctactaagtcgtcgcgaccgatggttcctatcaatctccttgtcgatcagctgcacgtcatattgttcagccatacctgcatattgaaaaccatattagtacaatgttcatatggtaacagtaaattaaatgcatgacacataattcagatacataatttagataattaaattgcaacacatttattcaatttaaaattacaataccttcagataataaaagtgcagtatattgcaaattaaaactacaagccaacaacacgtagatttggatattaaaagtgcagtgcacagttcgaaaattaaattacaagcccattacaaatagattcggatattacaaaaaacaagcccacaacacattgattcggaagttaaaagtggaggattgttcaaattaaaaatacagacgcgctaaacataaatttgaagacaccaacttaaaagtacaagcccaccaaggctattagcgatctaaggattatttttcttcttcgactttccctttggaacgcgacgaacatcagctcctgcggcgtctttccctacattgtacatggcacaatctttacgggcatggttctccccacaaagaatgcaagctttcttacgacgagaacgatctttcgctttagcttcatccataaggttcttgatcctacgcgactggcgacaacctttagtatcaactaataaatgaatccagaacccaattggcttgccctggaggaggacgagtgaaatcgcacacggctcgccaaccacgcaattcacctcgccaagttgcctcccacgcttccttcataaagtacggagaaacaaaatggtttgcatcaacacctccttttgtggaagcgacaagaacatgagaacatggctggtgtaacagataaggcttgtgcaattgcatttgcaagcatgatactctggccacaacgtgcattccaatgtgatgtcagtagtcccaatgccgacaccactcttgtcacgaagtcgtatctcaaatagcaactctctattcccagcaggccacactctatgcattcctcccttcttgcttttctcatccatgtactgtgtaattgctgggctatacttaacactgggtttgctgaggttaagactagccatagaataccttttacagagatacttctgtgtacccctagtgatgccctcaaggatagcaacaagtggtagcggtcgtgtatttttttcataacccagttatacacttcagcaagattagttgttatcacactatacctcgatccatttgtatcgtacaataacgaccatttctcccttggctcaaattcaacccactccgtgaagcacttcgtggcccttccgcgcttcctgcaccgagtaatacttggtgcttcattaggaatgggttcaagtccctccggctcctcctgtctggcaactacgggctttttcctaacctcttccatgtgtgtagtggtcaaatgatcaagttgttcccatatagcatcaaactttctttgttgattctgcttgcataacttcttgaacaggtccatcaatctcttactcctaaattgcctgtaaaaattagccccaagatgtcgcatggaccatctgctatgcaaatctggccatggcacggactctgtcacatcttcttgaagcttctgtatcgtcgataacaaaccggcatgtcggtcatgcagaacacaaacatttggtctgttttgaacaacacacattttaatgtgccacaaaaaccatagccagcttgatgtgttctcgctttcaacaaatgcaaaagcaacaggaatgacatggctatccgcgtcgactccgatcacggttagaattgttcctctatacttgcttgtcgtgaaagtgccatcaacacagagcaaaggaatgcaatttctaaaggcctctatcatgcacccaaatgaccagaaagcccgacgaagaacattctctctattttcattcacctcgtggagaatagccatgtgtgtgcctgggtttcttgcctgcatcacctccaatagtgggggaagattgtgataagaatcctcataagttccaaacctcatctcaagtgctttctgttttgccctccaagccttgacatacgatatctcatatccgtactctttctctacgtcatgcattattgtgaaaggggacaaagatgtttttctaaccacctttgaatataccatttgtgccacaaataccgctgtcatgttcctatgtaccagatgagtattctccaacaaacacgtatgttgctcaaccctcgaagctacccataaagtgtcatgttgtggcttgtaaccatgcactctccaaggacatccagcctgtgtgcacttcacgtcgtacgtcgtcctatttgaaaccttcaccctgaactcacgcttctggtcaaatgcccacctcttcaccgcatcttgtaagtgacctttgtcatgaaacatctgcccaacttgcacctgcttactatcataacgccagtgggcatctaaaccatcgttaaccttcatacgactcatcgatatggtcgtccaatcatcgggtatgttggtttcgttgtcccacagtgttgtatcttctccttccactacaagcgcaatgtattcttcgttttccacttccatccgatccactaccgcctcattctcctttgctgcatcaacacgcataggcgaatctggttcttcatcgtccgagtcgtcggcctcacgattattgtcacgaacaatgacctctgcttgtgtattaccctctactacttcttcccccgaccttgctcagtccgccaaacattttcagcttgtgcaccttccaatggagtttcttccaccacggcatgacttgactcccccgatcgatcaacacatgttgtcttctgcaccactattgccaggctataccctttctcccttactttactaacaaacttcctccaactcccagttgacgcaacctccactactctccgctgccatccatgttgaccccttactggccacacggcatttatgacaaatttatcgagcactggatctaccccaaacatattatacaaccaccctaacacatcgttcaaacccatatgctccggtgcattcagactagtattatagaaggcatatacagtcaaatccactccgctatcacatatttgtataggagcatctccataatacagacgaatgggcatatcacctgacatcctgataaaacattataaattgtcttattatacggtactgaccgacacatatcttacccttacgtttaataatcatcatacccagttgtactaacctctacctatttaaacacatcaaacattaaatatatgtactaccatgtactaacttaactaatttcagcatacgactaatttaatatctctactcacatttcacaatgacaactgttaacgtatcatatgatatgtagtcacattggagaatgataaacaattaacaaatcacaagtcttcttctataagattaaaaaatcgtaatcctcatacttagggattacaaatttatacctcaatgtcgtcgcttcaagccgttgccttcactgccctccaggccggcgccgccctggccttgtctctggccgcccacaccctcccctcactccctccagcgcgcacggcgacagcactggcgactgcaatggtgacgatggcgatgtggtcctcctcaatcggtttagagaaagctaggttcgggctgccgatataaagggacctgtcgaatgcccattgttcgacaggggcggcggcgggaccagtcgaactccccgtattcgacaggccgcgcggcaccgggtggtgggcccagtcgaacaaccccggttcgataggccgtcctgtcaaatggctacagttcgatagggcccaatcgaaggctggatgttcgataagccccttgtcgttcctcccccattcgataggagcctatttttgcgatttccaacagatggccgctaattttgcgattttccataaaaataatattaattctcaaaaaaattccttcaaggcatggcaacatgtgttgaattgtgtcttctcggtacaattgtgcacatctggccagagtaaaactatttaaatagttgtgccctcggttatgggcgatcaaccagattcaccgtgattaatcacattctattaattaacttgacttaatgaattggtttagatcaggtagaatggttgggcctgttcaacatggtgtagcgttgttcagtggagatttaatagtgccttaattaatcaaccgttttactattttaaactataaaatgtttgcaatcgcctttatgcaactagccacaaacccctctttgttcccccttgcatgtctgcatcattggtgtggcttgctgaatatttgtactcaaccttgctattattcaccctttttcaaaagtgtagtgtttctgagttgaagacgaagttagaggaccaaggcttataccccagttgagttttgcctatggagtggagctaaagccccattaggatcgcctttgtccgttgttgctgttttttttctgtgtgaggactaagtgcctcttatgtaagtatttacagtttatttatatttggatctgtatatttacttgttgttttgtgtaccctagctgattcctggacagggacttaatacacaaaatagtctgaaaatttgggctaaatttctagatgtgacagttttaggctttgcagagtttgtacagatatccacatgatatgaacactctaatttgttttgtgctcgccaggcactgccatactcttcatggtgaatgtggtctagaggttataacaaggcttttacattgactaccgtctgaccttgcatgagcacgatgaattttcaatccctactaagtccagaacattagtgttgttaggacggttggcctatcgaacctgacaccgtggcgaagcaactcttcccatgaggcattcagcattgtattggacaaacttagacacccacgctgtgaggcggaacagtacactcatcccctcacagaaaacacacacttaggactagttcactcatcctaaaattcaacacacacatgggtagctcctctagatagcctacagttcactcgtggccactacctatactgcatcggtctccttaatgcaatgttagacaagtactcaacttaataggccaaggttaccccataaataacatatgtggatgtacggtatatgtgatatcccggcccaattagaatgaggcctgtgtggcccatgagagctgtgtttaaacaataacacgctttagtttcaaattatatgcatgtatcattactaactacgcgattatttgtttctccctcttatgcaaacagacgatgagtacggttcggcatcgacgtatcatggaatgcctacttactcccctcgcacagcattcgttgaggacttcttttccactgagcctcctcaaggggaactagggatggattactggcacgcagcacctcaggtgacacagccgacgcaggagatgggggccattcaggctcccaatgtgacaccacagcaggcagcaagagagaggcacccccctgataatttgacttatcccactgagcaggttaggcgtaggaagaaggggggacctagcaagcgtgcgaagggcactgatcgtccttgagttatctatttctgttaaaaattgagacatttatgttgtgtccgtactatttgtgaacaatttattattaacttagtaactatcagtactatttttgtcttttttttcataccctttccaatgacggagtacaaaagattcgcttcgaactttgcagcgcactatactacaataatgaaaatataaattcattcatccaaatattttaaccaaaaaataaatactaaaatttcccacaaaatattattaaaaaatattaattgtagaaaagttccagaaaaaaattcacaaaattcacaaataaaaattcagcctgaggacaagtcgaagaacagttgttcgacagggatcctatcgaaccaacgctattcgactgctacctgtcgaactgcccctgttcgacaaggcgccagtcgaactacccctcttctatcgcggtccacccgttcgataaggcgcctatcgaactgcacctattcgacaggaccccatttttgcgattttccacaggtggccactagttttgcgattttccataaaaataatattaattctcaaaaaaattctgccttgaagtaccacgatgatactgcaaagggggaaatggtaactccccctaaccaatcgcactacacacctcaggtttcaccccctccttaagccaagtcgggtaggcccctctcgtgcctaggtgaatccagaagcagcataggccgtctgtcgacctccaattttggaaatcggaaatcttctgtatttatcagtaccaatccctggatcagtagttggtacacacatacatagccaaatcacaacatatcatgaatgaattcaggctaagagagttaaatgcttacattagggcaaggcaggccaacaactatcagagaacaacagcggaagacaaaataatacaagggcccggttgacatgccacaagcaatcgactggggaacgagacctagaatggaaccgcactccgatcatcttgttaggtacgcaagcatactaacaagggcttctcttcaacactctgctaaaagatatatatagagcaacaatgagtacaaaagtactcaacaagccaccacacaaaatgcaataatgtacaggataatacaaggagtggctatggtttctttgcgtaaagctgagttttcaaatattgtttcacaaacctaagacctagcataaactgatcaagttttaattccattattcattaaacagcgatggttctgtccaccatctattgtgttcccaaggatagcttctcgccactggtcatcatggttttctggggtctaccacttctcgcctctcgagaagttgatccaccagcacaaaatcatcatgcatatcccatccatcattttaagaatttagagtctagccaagtgtaatacatatcccggtgctcaatatccgcgagcatggctattcgaatagattgatttactcacactgcagtggatgtacactttacccgtactcgtactccgcgacttgcccatcacataagcctatgtcccaacgaatgagacttgctacggcaaagcctttcaacaacctcactttggcagtacccgctccatgaactttagtcctcatgcactccaggcgtccaaggtttctagcagtgagaggagttctggcgctcgcgagggggaaagactcacacattcattaagttatagttaagtttaggtttgcacatgacagtcctaccgatggcgacaccattgtaggcacccgccccttgcggtcctaccaatggctgccccaccgtaggccctgcctcacacacaacaagaaaaccactatggcttgggtaccgcctccgctcggctatttactccgctaggtctatacccacacgagaagtacggttgtacaggggttgtttcatgcttaacttcatggctcggtccttaactaaccagggacggcactagccttttccggacaccacccaagtcctctagccgccccagtcgaaaacagttgtttagtttcatttttttcatttaacaaatcatgtcaccaatgttcatggcaatgtggcgctcatatctccacatgccgaatctcaactaccttccctaaggtagttgcccaagcatatagcatttaataaatatgagaatgcatgattctaaaatagcattactaagcttttgtcataattgactaaggactcatacgtaatcatgggtacaaggaaataatgagggaaataataatcaaaggcatggcataataacaagtaggatattcatcttgcatgcaattttatttataaacaaaacaatttcgcaattcggatcaacatgctaaagggatggggtgatgacttgcctgctcaggatagttcttattcttgatataatcttgatcaacgttcacctcctagaagctgcatatgttacctcacaactaattgatacaccaatactataatacgcgagagaaaccaatattcaaacaacaatcaaatatgcacaaacaaaatataattgttgaagacatacctaaggctgttggtactactcgcgtttgctaatggataatctcttaatcattcttattgtcatggcggcttatttaggagctaaccagtataatatgaatgaggtacatactactaatatgtggtttattctagctacagggttatgggagggttatagtcaaacaaataattacagtgtttcatttgtattattattttatcaatggagtcattattttaatcatgatcaggttttacttgtcactataaataaaaaaaggtaataattatccatgctatatatgttagatttgtgaggttaataatattatagttacagattatcttattgtataactttataactttataatgaacaatcctcagttgtggttaaactaaaattatgtgtggtcaagatttataactagcactagtatttagctaatatactggttcttcatttattacctagtttaatatatgcaacttgtagattatctaaaagggtatgtgtgtgcaacagtatattaacattgaaccatttactgaatataggcaatcgactataagctatatcatattggtgatctaatcacactagctctgttattatttctcaaaagcaagtcaacgattcatctatgagtattcatattttagttacaggatatgaggccaaatttgatttagataacctataagtcatgggtttaattatatggccatcgaatattaaataatactagaattttcctatacatccattcatttgagacattacttatatttaatttacatggttgctactgtgacaaaacatgctagaaacaaatattattacatctactctactgtataataccaattttatttattagcatattttcaagttgaccataatctaatcatttgatattaattatgtaataattataaatatattttattaaacagtgagttatataccattggaaagcttatgaatttagatgaatttaggttcaagtttcacttgaatcggagctaaaatgaataagttatgctagtttaaatattcaaatttgaataattgcgaaacagtactgttcatatccgatttattttaatccgaaacctatctacagctcagagtcacagacgtgtggggtcaggggtcttattatcttttctactgaattatttttgctaggggaaatatgggagtgggcccgacctgtcagcgacttggccaggagtcgtcttctaccttcgtcttattcttcctcccgaccgagcgggagcagcatgggaacacggcgcgcacgggaaggccggccgagggtgacccgacggcagccaggagaggcgcggaggagctccagcgatctcccgccggtgaccacgacgcgtggcgatgcggaggcgagcggcggctagggcaaaagggagagtttccgatcgaattggtgggcgtgggagtatctacggggtatggggatttcttttttctcgctagatggagaggggagctcccgggatagtctacccacgaggggcttgccggcggcggaacggcggtcgggccggcacggccataggcattaatagtacaaactggagccgacgctagctattagaggtacagagaatgctatggtctcgagggtttacccagggatggagagacagtgaagggcggcgacgcgtggtgcagtgcagacaaagcagaggtggctagcggtcggcgacacacgaaagtgttcgacgcgtgtttcccggcgtccagcggtcctcggcttccccaatggcaacggcggcagcacgacacccccgcccccccgccccccactccctccaacctccagctctggacggggagtcccgcaatatggtctttggtagcggtgagattacgcacacaaggtgttcgacgcaatgtattcgggaagaaagctgagaggaatggggatttttgttgggggcttagcttaggttgtaaggaaacggtgtggataagatcgccagcacattcccaggcgaaatagagctctaatggctatcggataagggcaaggaggtggatgacacggataaggtttgatctcctcctccattaaggttctatggctccatcatcatacctaaagcctaaagtctgtgcgttctagctctagctgtggtaggaggctccgttttacccagcggacataaggaggggcgccaaaacatcatgagatgtggataaggttttctcttctctctcacactcagggatttggggaatcaaatggccggtattaggtttgcaggcctcggagctaggggtgacgaagggcgaggtggcggccgttatccctcggcgtcgagaggcgacgcgcgatggcgacatcgatgacgccggcgctcgtggcggcatgggcggagcggcttccgcggctgaggtccatgtgcgagcgcggcatggcgcacggtctcgcggtggagtggcgcacggttaagtaaagacggacgcgtggtgggggctgggtcgctgggtgttcgactcactaggttcgagtcgaacacctggcgcgcaatgaataatgccatgctggaataaaaagagatttttagggttttggtttatttaaaaatcgagaaagatagctaattcaatttgtattttcaccagtgcatttgatcaacaatattaagtattcaaatgtgaatttggtccaaaattaatattgtccaatattttaaattttactatagcttttatgatttcctatataccttgtaggctctgatatttataaaaattaattaaaatattctaatgtgactactattaatacaatagctcattggttgaacttatttgtctagcaatgtattttacatggaaaagtttaatctattttattctagaggtaatttgagacttggtataatattgatctaagtatttaattagatactcccatccttcaatctttatatatagggataaatttattttatgtgaacaattattttatatgagtgaattttatgccatgagagatttgttgtaagttatagatattaatttaattatttcagtgaaacactcctatatatatagagtcattgtagtgacgactatttcgtggttacttagatgtcaggacactattcaatccgtaacttatagaaattaataagtgacttgtactttatttggctttgctatcatgtgcacaaatatttatgggatcgatagatagcgtattcttgcaaattgtacatctttaatttaatgtttcattgtgacaatttatagtttggcaagcaatagcaaccataacatccagcatgatgcaaaagttttaaaaagttcgaaattttagtgatttttattgtcgggaattttcagggtgttacaccgtcgcaaggcccatccatactccattacgtccacccttgcccgggtacgttagctaggaaaatctacgctacaaagtgcagctgttgcccacgctggcttgtgtaagcgcggtaattctattcttccagggtttcccccgaaccggtccttaattgccatgggtgcgactagcaaaaccatacacccagagctcgttgttaagccatattttagttagataattacgaccaataaaacatgaccatatgtctcgagctcatagctcatcaagatgctaatgcatatagtgtgattatcccataatgtgagctagtggtaattaaaaatggctaagcatataaagattctagcaagatcaacataagtgacacaagctagtcaaattatcacccaagcttgacaaaggagggatcacaagtaaacatggaacacgcgaggaaataggtagtcccataatcccatgtactcctaattagcaaaacgtgcaattttagttgcaaagagtaaaacatttgtaaattagcaaggagggctaccggtttgaggaagaactggggagtgaagctcattagctgcaaacttgagggggatcaatcaataaaacatcacgcaccaacagaaaagagaaggtgagaatttcccccatactaccaccacaaccacatcctctagtaaattaaacttaaaacaatccatcaccactgtgtagtttttccctagcaccttagttcagcttttaatagaaaagaaggagcggtagcaggctagcagcagataaaatggaggaggaaagaataggagcacttacctaggggatgattgctcggtgaagtcgagctccatggggcgctggtcatggcgtctgggtctagagctccatgcgtgaccctattctagccatgggggggtccacttcttggagctgtgggttggagagcatagagagaaggattaagaggggaggtcttgctggtagcctgggcattgaggtcgccgagagcaacatggtggtagcagcagcagtactagagtagtagagtgaggatttgagggaaaagatatccactgctaatggcaaatggaggaaggaagaaggggattagctagctgatgcttttacctgcaggagtgataagaggggagagacggggagaggtttctgcaggtgagagaatagagaagaaaggaaaatgtggactgattgctagatgtacattagtaggctacacagaacaccaacctgagcatagtgacccaattctgtagtccaagtatagtttgataaattatctagcacatcacaactggagtttcggtacaataaaaaggttacaaatttgtaagcacatttgtatttgtaaattattgtatttctattagtatagtttaattaaatctcgacgcatttgacggaatacaacaagggaactagaggcggagtctggtcagttgggagcgccagctatttttgatttgaactacgagaattcaggcaagcgaacctttgatcttgatgatttgaattattttgcataaaccttattttgcttcatgaaactgtcaccttgcataaaatagatttaccaaactataagtcggatatataaggatgatgatagatactgggaggggcagttgatggagaaactgatcaccttcggaccttccaacacttattagggtgtccacagatggggattgactggaaacgggaccctttacatatggctataatataaggactaaaatcactctcacatgcatatgtgtgctgtataaaaatcatgtcaaccatatccttgttgcaaggcgagcaacgctttgtatcttatcaagttcttacactccgcatggtgtgtaatgatagatagtgctaagatgggagaccctataaaccccatagaacattagtacttggatgggagatgatataaaccccatcaagatagtagcacgtggtggagtggagtgtaatgtgctgaaataagagaagagcatctagctatctattagtccattaaattttctataaacgcttctaaaccgccacgtggcgctcctacaaatgttcttatatcgccacgtggcaggtggacccaatattttataaatcattaaattatactaattttcaccactacatcttatctccaagaatgaaaatctgtacacgctccactttccgttcgcatatttatcacgtaatatatttgaaaagaaaaacagaacgtgcacatatatgtacatactctccctccctccctgtctgaccctcttcccttccgtctcttctcctaatttctacctctaacaaccatacattataaaaattaattatacattaaacttcctacaaacgcttttaaaccgccacgtagcgctcctacaaacgctcctatatcgccacgtggtaggtggacctaatattttataaaccattaaattatactaattttcaccattacatcttatctccaagaaagaaaatatgtacacgctccactttctgttcgcatattcatcacgtaatatatttgaaaagaaaaatagaacgtgcacatatatgtacgtactctccctccctccctgtctgaccctcttcccttccgtctcttctctctcctaatttctacctctaacaaccatacattataaaaattaattatatattaaacttcctacaaacgcttttaaaccgccacgtagcgctcctacaaacgctcctatatcgccacgtggtaggtggacctaatattttataaaccattaaattatactaattttcaccattacatcttatctccaagaaagaaaatatgtacacgctccactttccgttcgcatattcatcacgtaatatatttgaaaagaaaaatagaacgtgcacatatatgtacgtactctccctccctccctctctgacctccacccttccgtctcttctctctcctattttctacctctaacaaccatacatagtataaaaattaattagttagctaaataatctattagtacatatgtttttatataaaaattataatatatatacccttaattttcggtgacaaacccagaaaaaaatattgggacatcacttggatatataccctttcttttcaatgtcaaaccaagaaaaatattattatgacactgcacatataaattatttaattattaattgatattattaattaatatggcatgaattagttaaaatcgaataatctaccttgaaggtgaatgtagttacgccactatatattttgtatagcaaccaaatagcaataagatattatagaaatgaacatatattttgacatctggaaccattcgacaaacatgaaccatgaataaattttcatataaaagaataatttatctagcggccacaaagaaacattaaagagtaaattgcatcgtcggtacacgaacttgtcaggtgggtgcaatatagtgcacaaacttgtaaaatgttcgttttggtgcatgaacttgcgtggtgcgtgcgggagaagtcaaaaaggacactatatgactaatcctattgatttaggggctgattaggatgctatgtaaacatatatatatatatatatatatatatgagaaggttgccactagacttacacctattcaataaaatatagaataggatttagtgatagtagaaaaagatttaaaatatcgagcactgatataagggttagaaacatataaaattcatcatttcaatgatgaaggataaagtagagactaaatttataaatattgcatgtcctatgcatacttgctacaggtatacacgtcgcatcctaatcaacgtcaacttcataaaattgacattgccaagttattttggtcctcattcgcacgaaccagacaagttcgtgtactgaaacgagcattttataagtttatatactaaattgcacccacctaacaagtttgtgtaccaccaatgcaatttactcaacattaaaataaatgaacatgtattatgtaatcttaaatcagtgattccacaaaatttcatagcgaaattagatcgacggtattaggataagaatttataaactcactggctaaaggagtaatttatctagggaccacactattacactttgcatataatccaaattaccgtacaaaattgtaaaacaatttaacaatatatgttgcttcatcatacattaattactttgtaagcacgcatagaaaaattggatatataatatgtaggtgaaaaagaactaacttaactttgactaacataacaattatgaaaaaaatattttacctttagtcagatgcaacaatatccaaataattatgtcttttgaaatatgcacaattgataagacaaattaaatcagttgatcctttacataagcgctctaaaatataatatatggtgccatttaatggacttacaggtccttttaacaaccagatgaatattgctttggcttccataccttctatatataaagataattttgtctattttatatgcgtaggctattgaaaatgtgaatactcctataataagtagtagtagagaagaagaagttatgtttgttattcgtacacatgcataaccaactttaaaatccatttagattttataacatacttattataaacacgctatactgacaactcagacaaaattgcagccatggaacacatataatgattaacttatttcgattttctatgtaccaagaaaaatcaaggtatatcaaatgttagcaaactatgatacgcatatatttatatgtattgtttcacatagggaatatcaataatctatgtaccatgataattttaagccactttgtcagttctacatattggcaataagaaaaaggtggtgtacgagatcgaaagtggataggtagaaagcaaaaggtttagacaagttcagaccctcttgacaaagaggtaatacccctactcctgtttcggcgattgaattcgtcgagtgttgtattgatctaacgatcttggctgtggttatgccttcaaaacaccccgtgtccttgtataggttggtgcaaggttagaagggtagaaacctaaccgaatccggcatcggtttccttatatattacataaccgtatatgagtaagacttatgagacttgccgtaggaaacaaggcaataataaatccccagtcctaattattacataattcctagactcgacccacctcctatcttcaatcgaatatccaagcgagtgggtatgtggtatccataatatccacacacttatccattatttttcattacactattacataaatgtttttttacatatgcggctaaaatgttaagccgcttgtattgatgccttagctgcctcaacctcagtggccacttttgcaaataacatttgtagtttacacgggtggagaaacctttattagttccggatggtaacccccttagtcccggttctcaaaccggaactaccaatccgggactaaagatcgctatcattagtcctgggtggaataaccgggactaaagatcgatctttagttaccggtaccaaccgagactaaagatcgatctacctttttttttatttgcatggccctgttgctgcatggtttatatatatatatatatgtgtgtgtgtgtgtgtgtgtgtgtgtacacatatgtatatatatatatacatgtatatatatacatgtatatataaatgtatgtatatatatatatatattacatatatacatgaataatatatatatgtatttatacatatttatatgtatgcaaatgcatatggatatgtgtacaaaatagacatatatgtatatattaaagcacttaacattttatgtgcatatatgaccaaaatatatatttacagtaaagtaaatgtgtacatatataaatatagacatgtattacaattcattatgtcctagctacgacttcgacgtagtcgttatctcagaagataacgtcttatgaattgtagatttgtcgtagtagaattcaccctcgggattaaggacttgttctttgatgaatcccatgagttgttcttgaaccgccgtgataaagtccttgtgtgtgaggttgtccctcatgtgaataacctatgaatgtatgaagttatattaattagtaaacaagaaatcgatacgtatgcaatgaaattttgaatggtttatttatacgtacatcgagctctcttgtggtgatgatttgagttgcaaagcagtggcaatactcacatacgtagtagccacacaagttagttccctcttcctgctttgcacactatatacatgacaaacgacgagagatttaatatacacttatatttgaattagagattcaatataaatttagatcatgtactcactggaaatttgaacctctggctaagtttttctttccaagtgccgcggaccaaatgacagaaccgataccaagccctacatggagtttaaagctacgatttgtactagcaatagcaaaattcataataataacactggaacatatgacattacctatctataagttcaaaaacctggtcaaaagtagactcatctttattcattgagtcatagacattaactctgcatgcctccaagtcgaagagtaaaaggacccagtggaatatgcaatttgtgttagatgatatatgaaacactgtacatgtatatgtacgggaatgaaatttgttcggtagacaataaaaactaacgctgtgttgtacggcagtagtatgaacgtcttgaaatgctgctccttgaggagatggacgagattttcctcagtggcctgtggatacttggtgaccatttcgacgtttacattccgagggtcgatgaatccagtatcgaaaaccccccgccgtcgggcccattgaatctccattttacaacaataaaggaattgttatttatggtgtacatatatacaaggagctaattaaaggaacgtaagaaatataactctcaacgatacgtacaaaatccatgcgctcagaagagagacgtcgacgacgtctagctggtatagttcgtagatatccttaaaattgatccagagaacatcttctccttgtaagaagtcggcgttcttgatcctcgctccgataatctccctaccgctggtgctcatctctatgtaccgttcatggaattggtacgtctgtgtcggtagggactgtagctgctcaggtgatgaggacacaactaagcttggatataaccatgactaccttatgtattaatcaaccaaaggtgcatatgctctacattagatttacttgttatatatttgaacaaacgttgcaacacaatgagtttcgtgtgtttttgtttgcagaggtacttgcttgggcgaaagaaaagagaccgagcgtaaggaatgcatggatgattgaagaagttgattggggaccaaaccaagaccttctccaagtccacttccatctcaccacatcacttttggtccatagaagataagagataaagttctacacgttttggattcggattcgggcctcctagcagcatcaacttcaaatggatctaggcgctgatctagaaggaatttcggggtccatgagtacttgttgaaaagcttatggagtctactttcagatggttttggtcctgcatcaaaattcctactgagctgccgggaatctgcaaaacaagccatgtatctcatccagtccgaatctgatttgggttttgggccttgtaattgtgtcgtgggcttagcccaagggggtgtgcgccctagtgcaaccctaggacgtccctaatcacatttattcagtagccgtcatcgtttagagttgggttttacttagattattctgttaagaacagtttcgtcgctagatcggtttgtggaaccccaaattcgagtgcttaatcattcatatgcaatttggttgcaatctatcttgttctttcttgtgttcttcgattcgcatgcagggattagccttctcggcgaggtcaaccgggtttcagcacggttgataaccagaggagacgtagtgctgcgattgcggggctcagtagcgtgttcgttcagaagccggatcgagttgtgtctcgactccgtccaaatcaattgtttatcaatacctatcggaagatcaggacctaacatccctcatcagtaggtatcagagcccggttgcccgttaggtaatttaaattcccataaccagaaaattgccacacaaaaatatttattctttacctagacaatttgaactgttgcattgttctattagattttgcttcgttgaattttagattgcatcgtcgtgtcgagtgctggtttagttttagatttaattttagttttgagtaatgcatctgttcatcactttggtccagggttcatcactcaagtgtgtgagttgtacgtcagttttgggtccattttttcatctcgttggttgttgccgggacattgaaaaattgaatcgtctcgtcatcgggtttccatttttgtgatttggagaaattttttatgagttgccgtactgtgcacgtgaggagagtactgcgcgcgtgaggagagactccggatcaaatccgatctatccgtgaccgtccatattttcctctttatagaagtgttaagtaacggatttgagatattttttataaaaacagaacatacatgacatgagcaatccatttttgagatgatccaattttagttttgcactttatgtttgagtccttgtaatatttatatttacatttgagtccctgttcgaggtcagtggtcagtttctgttgaaaacaaaaacacacgaaactcattgtgtagcaacgtttgttcaaatatataacaagtaaatctaatgtagaacatatgcacctttggttgattaatacataaggtagtcacggttatatccgagctagttgtgccctcatcatcaggcttgacaagcggtttaccgagttcgtactggtgtctcacttctgccttagggattggtgcgctttaagcaactgagccctagttagcccggtgtcagaaatgaatttttttattccaaattcttgcccggtcactaacaactcgacctcctggtttggttgctctccaagctgagggacttttttggactttccagaatgtgctttcctaagtgttcgctcatagtccgttagctttaaggcctccttgagtggtcccgacatcttctggaagaacttcttggcactcgggtctataggaatcttcttttttggactctgaggcttcaattgcctcttcacttattctgccacgtaagcgtcgagctcctcttgcgtgcaatcgtacggtggctccttgttcttggcagcgtcaactttcgccttcttcgttgcccttgtgcgggcaagcggtggagcttggtgagttcttgacttggaaggtgccggaggacatggcagaggagcctgaggagaagtcgatgcaggagcctgaggaggagacggtgcaggagcctgatcagtaggagacggtgcaggagcctgaggaggagatggtggagccggaggggatggtgcacgagacaccgcttgtcgcccagggaggatgatgtagcgcttgcgccatagtataatggcgtggcttgtgtcgcgtagatacgtcttaccgtctcctccagggtagtccaactcgagttcctcgtacgcggcttccaccagttcaacttcgaccctcgagtatcctgctggaatcagcctgcagtggtaagtccctgaagggtccgttgggatggtcattcccgacgtaaccttcacgtgatgagaggttatctattagtaatcaacctaagcagaaacttgcggaatgtacaagtccaaaaaaacataaaactacgggcataccttgattgataagttcttgaagggaatatgcagctcacatggtgtccgctgcgtgatctcatcaatggggcaagtggtttcgtcctgagtttgcacggcgtccatgctctgtgatcctacctgccccgttgaggcgcagctgctacgattgcctgaggggctgaccattacaggaggaatgtatggctgggcatcatggcaccgatgtgcggccatgcgttcatccaccttccttgccacctcctcttgcatgctgagctcgtagctcgataccctgtactcaagatctgcaatcttcgcctcggtatctctcttgctcctcatccgactcttgtacgtgtggatgtcctccttgaatccaatcttccaaggaaccacgcctttccctcgtgttcgtccaggatgctcgggagtctgcagggcgagtgacagctcgtccttatctctgttgggtcagaacgtgccctgacaagaggcttccactacatccgttagtcgactggcagcctcgcgtatctgatcgctgaacaccagggagccgtcaacagggttaagcgttccaccgtgagcatagtaccagaacttcgatcgatccagccatttagcggtggccggttcgacacccctctcaatcaagccggcctccatctcctcccacttcagcattgtgacgctatagccatctgaccccaagaggtgatggtacttcttggcggcattttctttgtttctgtccatcatcgcttgcccttgttgccctgtcttgtaagcgacgaactcgtcccaatgatcccttagcttcgggaatacgtcgaagttcggtgtcagccccttcaggatgtatttcttgtagagatctcccttgaagctctggaattgttctaccattttcttaagagtccactgtttcactatgttctccgtacccgcagggagcgtgaacgtctcgagcattgtgatccacatcgtatctttctctgattccgggacaaagctgtcataatccccgcgtgcccttgttctgcgccagtacaccttgctgacaggcacgttatccttcacaacccaaccgctgtgtcgtacaaaattcttggctgcttcagccggggcactaggtcgatcgtcttcgtccacctcagttatgatgtgccgaccctctatcttcttcgcggcacctcgttgtccgcgtgccctcttctgtccagcggaggattgacttccactagcctccgcctccttgttcccctcctcagtcccctctgcatcactctccacgttcccctcctcgttcaggtactggtttggatcctcgttcccctcttcttcgttccagtactggctgcttccctctgcgattgtatcgtatagtatatgtttgtcatcgcgatcagccatctgttcatacaagaaatatttgcagccgtttgttatttacgtatataatatttgattagaactctaataatcatatattaaaactctaataatcatatatgctaagtctaataatcatatatgctaactctaataatcatatattaaaactataataatcatatatgctaactctgataatcatatattaatactctaataatcatatatgctaactctgataatcttatattaaaacgataaatattaatacatgctaagtctaataatcatatatgctaagtctaatattcatatatgctaactctaataatcatatatgctaagtcgaataatcatatatgctaagtcgaataattaatcatatattaaaactctaataatcttatgtgaaaactctaataatcatatatgctaagtcgaataatcatatatgctaagtctaataattaatcatatattaaaactctaataatcttatatgaaaactataataatcatatatgctgagtgtaataaccgtatatgctaagtctaagtttctaatattaaaactctaataatcatatatgctaagtctaaataatcatatattaatactctaataatcatatatgctaactctaataatcatatattaatactctaataatcatatattaatactctaataatcatatattaaaattcgtaataatcatatattaatactctaataatcatatattaaaactctaataatcatatatgctaagtctaagtttcatatattaaaactctaatagtcatatatgctaagtctaaataatcatatattaaaactctaatactcttgtattaaaattctaataatcatatattaatactctaatactcatatataattacatcacttgcctgcgcaaattcctactagggctagctaccactttggcttaagggacgacgacgacgtctttcctacaacatggaaaaaaatgtgttagtctaaacacaaaggaacatattttgattagtgcgctgcatgattaaactaggacggaggggagtagaagtttaggttcatggattaatttgtgagacatgtaactttgcgttcattcgcgttttattcccgttcgttcgcggttcgttcacattcgttcgcgttcattcacgtttcgttcttgttcattcgcggtccgttcacattcgttcgtgtttcgttcccgttcgttcgtgtttcattcccgttcattcaaggttcgtttacattcgtttgcatttcattcccgttcgtacacgtttcgttcccgttcgttccagttcgttcacgtgtcgttcgcgttcggcagtggcggccacggcgtcggcaaaggcggcggtggcaaaggtggtggcgttgcacggcactggtggcgtggcacagcggcgtcgtcggcgttggcatcggcagtggctttggcacggcggcggtggcatggtgcggcggcggcggcggcgtcggcgtaggcgttggcatcagcggtggcgtggcgcggtggcggcggcggcggcgttggcgtcggcgtcgagagtggcggcggcgtcgggagcggcgcgaggacgacgacgacgagcgaggcggccggtttagagagagagagagagaaagattgagatcgcggagcctctcaccccaatgcggcggcggcgtcgacggcgacgacgacgacagcgagatgactgcggcgtcggagcaagggatgccctaggcgcggcggcgaaggtgatgcagctgagatcggagaaaaacatctaagtgttggtggagaagacgagtgcgccttgggcatatatataccccatgatctttagtcccggttagtgagaacaaccgggactaaagatatctttagtccctattcatgacaacaaccgggactaaagatcttatcttaacatctttagtcccggttgttcttacgaaccgggactaaagatatctttagtcggactaaagatatctttagtcccggttgttatcaccaaccgggccaaaagatcttttcccgctatttccaaattcttttttaacacggttagggttaagaaccgggactaaagataatagcattgcatattaaatttcattacatatgggtttctaaaatagtaaataatgcattaaaatgatttaaagtcacaaaattaatgacaaaaccttgaaaatatattgttgtctatagtaaattaagtggataatatataataagcacatgaatgatttaaaattgttaaaaattctaataatcatgtgtaaataccacatgtatgatttaaaattatcaaaaattctaataatcatatataactagcatatgcatgatttaaaattgttaaaaattctaataatcatatgtaaataccacatgcatgatttaaaatttttaacattctaataatcatatgtaaataccacatgaatgatttaaaattgttaaaagttctaataatcatatataataagcatatgcatgatttaaaacttttaaaaattctaattatcatatataactagcatatgcatgatttaaatttgttaaaaattctaataatcatacataattaacatataccatacaacaattgatttatatggatattcaatacatccaaaatagtttacatcgtgtacacaacaattacggcaatacattggcggtgacggttgaccacacgtagtttctcctcactattgtttcttccttgtgatcactaggtgagtaaggggtgtcttcatttgataggaggatgctagggtcaattgtcaccgtgaaagggggttgcccatcaaactgatcgtaatcctcgtcagtcttgtcctctacttcgacgatttttcttttgcctgggagaaccacgtggggctttggctcgtcaggccctttgcccttctttcctttgctagacatgtccttcatgtaaaaaacttgcgttacatcattggcaaggacaaaaggttagtccgacaaccttgttaaggtcaatcgttgtcatcccactgccatcaatcgttacgcctccaccagtcaacctaacccattggcaccggaacagagagaccttgagaggtcgatagtcaagttcccatatgtcctcgatggcaccgtaatacatgccagttgtaccatcgtgtcctatggcatctatacgaacaacactattctggttcgtgctcttcatgtcttgggctctcgtgtagaatgtatacccattgatcttatatccctagaatgtcgcgatcgagccagatggtcccctcgctaggaaggccagttgttggtcaatcgtctcgttacacatgagatgttgtcacagccacgcggggaaagtatcaatgtgataccgtgtaatccatgcatcggacttaccgatgtttctggcgcgaactagagccaagtgctcctcgacgtaaggagccaccaatgaagattgttgcagaaccatgaaatgggctttacggaataaattgttgtccaccgtcattattgatttccttccgagagtcccctttcccgtagtctcctttcatggcgtgattcaagcaccccgattgggcgaaggtcttcaataaattctacgcagaattcaatgaccttctctgttccataccccttggcgatgattgcctctagacgagcacggttacgaacatacttcttcagaacgcccatgtacctctcgaaaggaaacatgttgtgtaggtacacaggcctgagaataccaatctctttgacaaggtgacaaagcagatgcgtcattatattgaaaaatgaaggtggaaatatcaactcaaagctgacaagacattgcaccacatcattttgaagggcttctaatctatccagatcgatgaccttctgcgaaattgcgttcatgaaagcacatagctttgttattgttgcccggacattgtctggaaggataccccgaattataactagtagcagctatgtcatcaacacgtgacagtcatgagactttaggtttgtgaacttcttctccttcgtgcttattattcgctttatattcgtggagtatccagacggtaccttaatgctctctaagcattcaaacatactttccttctctgccttgctaagagtgtagctggctggactaaagtaatggcttcctttatcctttggttccgggtgaaggtcgccgcattgttccatatgcttcagatcattacgtgcttccagtgtatctttcgactttccatatacacccagaaagacaagcaggtttacgcaaaggttcttagtgaggagcatcacgtcgattgcatggcagacatccaagaattcccaataggttaagtcccaaaatatagagttctttttccacatcgccgcatgaccatcttcgctctctataggctggctgccaggcccctttccaaacactactttaagatctttcaccatagcaaacactgttttcccgctgcgatatttaggcttcgtacggtggtccgccttatgttcaaagtgcttgcttttcttccgtaccgggtggtttgtagcaaggaatcgatgatgacccatatacacaaccttcctacagtgcttaagatacgtactttcaattttatccatatagtgagtgcaagccttgtaccccttgttagattgcccggataggttgctaagtgcaggccaataattgatggttacgaacagcagcgatcgtaggttaaactcctcctgtttgtcttcgtcccacacggggacaccttctttcttccacaacagtttcagatcttcgaccagtggtcttagatacacattgatgtcgttaccaggttgcttggggccttgaataataatcagcatcattatgtacttcctcttcatgcatagccaagggtggaggttgtagatacacatcgtaacaggccaagtgctatggccgctgctcatctctccaaaaggattcatgccatccgtacttaaaccaaaccgtatgtttcgtgcgtcctttccaaagtctttaaatgttctgtcgatgttttgccactgcgaaccatcggcggggtgtctcagcatcccgtcctgttaacgttcttcagcgtgccaacgcatcattctagcattcccctttttcctgaacaaatgccttagccgtggtattatagggaaataccacatcaccttagcaggaattctcttcttcgttggctgcccgtcaacttcacctggatcatctcgtctaatcttgtatcgtagtgctttacaaacaaggcatgcttctaggttctcgtactcctcaccacgatataggatacaatcattcggacatgcgtgaatcttctgaacttccagtcctagagggcagactatcttcttagcctcgtacgttgtctcgggcaatttgtttccctccaaaaaaatgttcttgatgaatttcaataaatcgccaaatgccttgtcactaacaccatttgttgccttccattgcaagaactccaaagtggtatccaactttttgtgccccttctcgcaacctgggtacaacaacattctgtggtcctctaacatacactccaatttatgggcctccttttcactttcacagtcctccttggcgtcctgcaacatctgaccaagatcatccgcagcgtcgttatcgtcagcatccctgtccaccttgcccgtttgatttccttcaaattcagcgtactaagcccagtccggaatgttctcgtcttccacttcatcttcttccatttcaaccccttgctcaccatgggatgtccaacaattatagcttagcatgaaccccgactcaaacaagtggatctgaatagtcctgaatctagaatactccttctggttcttacacttattgcatggacaacaaataaaacccttatgcttgttagcttcggccactctcaaaaaataatgcacgccatcaataaactctttggaccgccggtcagcgtacatccattgccgatccatctacataaaatgaaaaaaaaaatcgtacataaataaattttcgtacaataatgacagtcatacaataatgataaaataattaaaaactctttcaacagttataaaataatgacatatcattattcatacaataattataaaataatccaacaaacaattcttatttattatttttgaagttttaaactaatattaatgttgtacttctttgaattttcaatttagtttgttttctattttttaagattaattttcattatattttaaactatgagttaaaaactctttcaacagttatacaataatgacatatcattattcatacaataatataaaataatccaacaaacaattcttatttattatttttgaagttttaaactaatattaatgttgtacttcttttaatttttaatttagtttgttttctattttttaagattaattttcattatattttaaactatgagaataaaactttcttaagtaaacaaacaaaattcctatatattcttcttccccacacaaattttctctctcatcaacttacaacaaagttttggagacaaaaaaaatatgtgaaacattgctcccaaagtaatataacaacaaaaaaaacattggaggatgaagttactaaccttctatacacctccaatttatatataatcaccaaaaaaatttcacaagaaattttggcatgacctcccctcttttttgaagaaattttgaagcttgctcgggctgaaggaggaagaagacatatataaaggggatctttagttccagttggtgttaccaaccgtctgaccgatcaaagatggtttctccactggtgttactcctggaacttattaatccacaagctaacatttaatgaattaactctcttagctacagaaaaagttcatttgacgttctaattatatttttcttatcttctttattttatgtttctcttcatatatacaagtcgtattttgctttgataaatgccaagagacaaaagctaataataaatccatcgagtcaataaactcatatccttgtacgtagtagctttataggtttctctacatcttgtatatatacacgccactagctcaaaatagtttaaattgttcctattaaatctacatgttaagacccaagtggactatatgtttttctctaaaatatcgtacaggtcctacgtatcatgaagaaacaatgtccaagatatgtatatttcttccgtctttactcattgacatgaatgcatacaacaaattgcatgcttatgaaccaattaaagtgatgactcgaatgttacaagtaaaatacattttgttagtaaaagtttctttgaggtttcttaagaaaaaggagacaatgagacaatggacgacattcaattaaaaaaagagaacatcttgcttttaatttaaacttaatttgttagacctgtttttctgcacaaattatacatgtgcccgcgcgaatgcacgggctaccttcctagttgtactctaaatattacaaatacgcgaccggtaatatatagattgaatatgggtacagtgatacaagcctgcgcagtgctcaattaaaccttgattcacgcctgtctcttggattagaggctacgggtgcctattgcggttctttctaactatacaagtgattagtagtttttcttataaattaaatatggactcttcttacaagatattttttaaaataataaattataatcgagaaatgatgacttgatatgatttatgaaatcgcatgccatacatccttgctaataatactgcttgctgagtacttgtactcacccttgctattaactatcctccaaacacttttgggcaagccacttttgggcaagccagtgagttaaatggtgggttggagggtcagtactatgccccttggtgtgatgaaaatcaaggggatgttgtttatgactatcacgtgtattatggaggatgggatgagttgatgtacgcaggggagtggtctagtagctatgtcagtgaacctgggatatcgaagcaggaactcccccgtctaaaaaaaagacaaaccataaattttcgtgtccaatatttgactcttcgtcttatattaaacttttttataattagtattttcattgatgttagatgataaacatgattaatactttatgcgtgacttgtctttttaattttttttatatttttttcaaataagacggacggtcaaacgttggacacagaaacccagggtttgtcttgttttgggaccgaaggagtaatgactaaagtactgctagctcctgcttagaacttgtattattaatgggtgaacttgtaaggccatgtttcagactttaaccctgcatggcatggtattgtaatgttatctgaaccttcgctatctctgatgtggatcattattcgcaaaagcgctactgtggcgaaacataattgatggactagtgacgtcattttggtaatgacggcgcgggtcgtcacaatattcttactctataggaccgaaatcttttgaaaaatattatttctgtaaaaatgtatttaaagccactcataagtcatcacggaagagagagcgggtggataaataaggaacgagagggagagagaggggagtatgataagtgggctctattttatttattttattttattagaaaaaatgctcgtgcattgcaacgggaaaggctattttaatcttatttttgttatatggtttagttaagatgaaattcactgtgttaaattcgtttggatatatatattgttagaaaatcatgatctgcaactaggagtctgatcttctcaaattagcatgcgaatttttttaaagagatttcttatacgatttcttctgtatttccaaaagcgaatgaacttaaaaaccaactcaaatatggatttgtatttccaaaaacgaacgaatttaaaaaccgacccatacacaaatggcgtaccaaagtaccgataaaaacatcttcaatttataatagtagagaagagatataagtagtagatagatagagaataacaaattaaaaccgactcaaacacggatgacgaaccgtaggagcatcttcaatttttataatagtagagatttgataaatgggatgccacgtgtacaccacgtcaacagatactatagtcaatattgctctggaattcaaattataccgtttttaatagtttaagatcatgatatcgggtattacgtactctctctgtcccaaaatataacaacttttagccatcaggatttatcccaaaatataacaatttctccagcaacattctctttccaaccaatcataacccaataagagcaaaatggaaaacttgtcgtgaaaaattttctccaaaaatttgaaatttttgagtatgttacaagcatttagctgttctcttcccaaccaaatacaaccctccaccattcacttttcccatatacctccactactcatcgaatcacaaccctccaccattcacttatacctattttcttaataaccgtatcccacttaaaaactttttatattctgcgacggagggagtattatagttgacaaaggtatattcagggagtcaaagtggacttatcactgcggctttgataaatccgaagtggactggaaaccgacaccgtgtgatccgtgggcgggcctggacttgttctccttgtcggattccagcccatataccacatcacaggcgcaggggcacagagcagggcgacccgtcgtataaaaccctaacgccgcctccaccagctctctcaccccagaattcccaaatccgcaacgcacgcacgacagccagagagagagagagagtcagaccgccgacacccgacgacatggccgtcgcctccgcgtgggccaaacccggctcgtgggccctcgccgccgaggagcaggacgacctgcccccgccgccgccgcccgttcccgccgccgacttcccctccctcgccaccgccgccaccaccaaggtccccaagaagaagaagccgcagcccgtcccgctcggcgagttcaacagcaccaagttcgtcgcccccgcctaccgcgggcccacccaagacgacctcctcagcctccccacaggcccccgcgagcgcaccgccgaggagctcgccaacgccacgcgcggcttcggggctcgctggggcggcgccggcgccggtggcccccgcggcgacgacgagccccgccgcggcggatctggcccccaggacttcggcccgtcgcgcgccgacgaggccgatgactggggcgccggcaagaagccgctcgagaggagggagcgcatgggagggtttggcgtggactcttcgatgtcgcgtgccgacgacgtcgatgactgggtctccaccaagagggcggcagcccccgcgcccatggagcggagggagcgtagcgtggcgttcggggccgactcgcattcccgcgctgatgattccgcgagctggatctccaacaagggctattctgcggcgccgccaccgccctccgacagccggaggggcggtccagtctggggtttcaacagggatggaggcccagacgccgactcttgggagaggaggagggaggaggtgagcggtggtggttcaagcggtggtgcccggccacgcctgaaccttcaaaagcggaccttgccactggctaatggcactgatggagaagggaaggaggacaaggaggaggagaagggagagatgcagcctaaaagcaggtcatcaaacccgtttggtgcagcccgccctcgcgaagtggttcttgctaccaagggagatgacgggaggaaggaggaggagaaggagaaagaggaggagaagctggagattcaaccaaggaccaggacttcaaacccgtttggggctgcccgcccacgtgaggaagtgcttgctgcgaagggtgaggactggaggaagattgatgagaagcttgaggccatgaagatgcgcgaggcaccaccacctgagaggaggtcctttgggaggagaggttcccctgttagaggagaggacaatgggagccgtccactgccagagagtcatgtcgagggagcttggaagaagcctgatgcagttcaggctgttggagaatccgaagatgggtctgataagcttaacacggctgaggctgcgagaaaatttgaagaagggtttgataactgaacttttatccttcttttattcaattggctaattcatcatcgattgctccctgttattgaattaatagttaattgatctctgttaggtactagtagtttttattgatctcagttattttttgtctgaggtatgctttctattgctagggtggaaaacaaatattgagcctgttactgtgtgctatctgcttttcagtatgtgtccctctagattcattgtcaagtgcatgtcctagcagattaccaattagtatgcagcgaagctttatttttactggcttcattaataaaataagttcctctcttactagtcaatttagcaacagttttattaagacaaattgcattcatataaacatagtggttggtatggtaatgtttgatttgattattgtttgtcttttgctgggaatgttttgtttgccagattttaagattatcattgcagtgaattgaagaacattgtttgcttgcttgatgtgatatttagacatgagccaaatacccgtgcattgtaacaatctagcataaatatatgatttcaaattgaatagttcacacttaattctaatacaaacgacgtgcaaatgatacagttatgcagagaagattgttcagataaaagaaaaatgaacacagttatgcatagtatggtggtggtgcaaactcatttccatcactgctagcttcttttacaatatactagtaaatatcaccctgtagttttggttcgttacatgttcttatggtctcaatatgacaaatgcttagccaatagccacttaggtagttggtgttgttctccatttgttccacaatctaaattacaaaaagtttcttgtctggtgtttatgctccttttcttttggcttcaaacttatgtacttgagtgctcaaattcgtgttgtgttgggttgcaatctaattctggagaatatgcgtctggtgtggcattgtactgaacaggaagggtcctgttcccatctgagttaacatcctgtgttcgcatacatctcttccttctaatgcatggaattataagcatacatcctgttttcaattctttgaaccatatagtttggtgatggtggatatcttgaatatggtatagtttggcataaaaaaaaacacagtaaggtacctacatatgtttttccaagcgattgacaatattgtggctgcgagtggcagatgtagatccaactatcagaatgaacaatgcaaccacaaccttataatagggaaatactgaaacagacatcatgacatgtttcttatgccttgcatgaatttttttttggttagtttatatgtgatgtagtagatcagccaccaggaagaaatttatcatagtaatttactataatttcattattgtgaatttatatgtttgtcatggtttgctttgtagaatgtgaattcggttaatatgattgttgtaattttagtaagtcacgtatgagttaatattcattgttattagctggtatggtttgtgcaccattagtgtgttcttgcttgtttctgattcatggacctcacatggaggaagtcttcgcaagcctgcaactgtacccctattgccttggccccttctagttcagtttaatttttgcatgtcatctcttattgaaagaaggaaaaattgtaaatatactttgcatttgtccacttaggttgaagaatcttgtttggcttatgtctcttattgaaagaaggaaaatgtaccatttttctaggttgataaagctgcgttgttagcattctctactatagggttattgttgttttcacaaagttcatgttgttcttccattgtcatatcacttgaatcatatttcagtgtttgtcttctttcatgttccctctatctgctgaacattatttcattgcaggtctgatgctaccaaagagactgctgcagcaaactaatctatgccggtacttgcgaacccaaggattgcagatctcttctgctaaatagcctttctattatttttttgctacttgtgtgctacagttgtaacactgagtcaattttgcgtccatgtttcttatcttttcttagcacctggtaatcgtgatttatggtattgagaattttgatctggaacttaggtcttaatcatagtgggtagtagctattcattctattgtgactgttagttgtcatgctatgttgacatggtgataatgtctcgaagaaagaaatagtgcttttttaaccttgttagctgtggagatgtggagtagcatttgtttagaattttgcatttacaatgcggctgaggtttgcgccagcaagtgtgaccgcacctatgatttctgcgctaccttgaatcacggtgaacgcttggctgaggtcctgttcgcgaaaagaattttttgtcacatcggatctttgaccgaatatctaagatatcagaaggggtttttggacacgaataaaaaaaattaatctcataactcgtatggaaaccgcgagacgaatttatgttttagcctaattaagctgtcattagcacttgtgtgttactatagtatttatggctaatcatggactaattaggtttgaaagatttgtctcgtgatttccatacaaactgtgcaattaatttttatttttatctatatttaatgcttcaagcatgtatcaaagattcgatacgatgtttttgagaaaaaaaaatttatggctaatcatggactaattaggtttgaaagatttgtctcgtgattttcatataaactgtgcagttaatttttatttttatctatatttaatgtttcaagcatgtatcaaagattcgattagatgtttttgattcgatacgatgtttttgagaaaaaaaaatttagtaactaaactaggcctcatttcgatgcctatggctatgtggcctgtttgacatgcatagccggtccaatgaatcactgcgaacgttcggctcatttggcttgttggaataaactagataaaacagccccctacgtatgtctgtaacatttgataaagcagccccctacgcatgtctgtaaaaaaaaaagttaagtggggtttcatgcggccttccatgatccactagtcgttctcatgctagattagcccctttgtttgacattcatatggattttacaatctgttgggaatgcataattttttattcaacgaagaccttcagttataccatcatttggctcgtacgttaaaccgatgctagcctagtgtctagggtcctccagtgtggtttgtaatatgagataccaaacctagtttgatgaacatctgcatgtgtctcttcatgatactcaaagtgacacatgcagatgtcctcgacctccctgccacacatgtagatgttcttttcccatatcatttttctaatctgccatcaaattcgcaaacaaaacaaagattgcattgctcatttttctcacgttggattggacacttttgtaagctgaaatttgtattatggagtttgttgttgttgttgcaaaagtcagctaaaggtaaacaactactccctccgtttaatattacaagacaatgatagaaagacttataatatgaaacggagaaagtaatcaaaaagcttctcctggtggagttgattgattgatgcctatttagatttcctccagtattctcaacgcagattccgcatagatgcgttgtctgaaaattgaaaaccacattacaggagcataaagttaaaacaaaatttagccaaaatttatagaattggagggagatagggaatgaaaggtttttctttcttggcgtacttctcttgggtgtgtctagggccagccggccagggcgattgtgtttcatgtatccatcccatggaaccttcttaaggccaacctgagcagcgatcatatccctcaccccatcaaagtattggaaaatgatgtgagcaattgtatattttattcatttattttaaatgaagagccaattcaattgcggtctctcctggcataatttgctgagggtccaagaaccaaacatcacacacaacaccccatgatgtcataagtcgaaacaattcaactgcaaaagaatgtctgacaaagcgttggatgtttagtttatacttcgtactcaaataaccaagacggccaaattaagcagatctgcacaattattttttgcatttcctcacttcttactgtcccaaaaagtgtcagtaaactctttgttgtatttgatagctattgggcatacaatgcagccaagctcaaaagcagcctgaaaaatcacagtgcagacaaatatgcaagccgtggttagtctggcaagaaagatgaccaaatatatcttatggaagaggatggctgattctattcgaccgtcttgtgtatgctttctggggtacccgatatacactgccagattgctactaccatatttggttactgctcaaaaagagtttaacgcgggtactctgatacagttttgtttgaagaaattgagtcttgaattttgtcttgtagaaactctgtacaacttaacaatttgaaatatcatttgtatgggcatatcacatatccatatatgattttttttcaacaaaaaggaaatgcttaccttcttgaacatgactgtataccgattgttaacgcaagttccttctgggaatatcataagaggattgttgtctggaagttggacatgctcttgtaggttgtagcctggtaatgaaatttcttcgagtaaaagtaagattaccaaatataggattgctaaggatagcatttcttacttttcttccaccatgttgaagcagaaggagcggctgcttgtccttggcgttggcgcgggtgtgtggttgggtgatgacgatctgctagccattgtcaataataacgaaattagggccctcctgtgtgtctcctggtagaaggcatcccatgcgcaccacctgaagtagtcaacaatgcagggaacttcttgttagagtggagccagaaggtcttaaggtaggacttggatatgacaactttgccggtgatggcggtgaaggggtcgaactccacggtgtcgatgacgagcacgtggtcgaaagatgtggtgtgcgtgtccgcgccgccccagcgccgctatcaacacagagctggagcgtgccagcgctctgaaggctagatcagaacgtgccctcgtttagcaggaggaaaacgacatacgcgtcaccgccaccaccatccattaaattcgcaccttggaggagaatttgaaagacttgggccctcttcactgcaagctctccacgtggtgtgctaaatttggattgtcgcacccgaatgcttgccctttgtgcgattaagatggggagacaatgcaacacatcttcatatcttatcttgtgtctctgcccgtcaagtatggttctctagtcctagaaaatatcagattgacgatggcagcacctcaaccttaggcaacctgtttttttagtgggtgatccaaggtagtcgagcattatactaaggagacaaagaaatgattaagttccttaatcagcctagtggcacaagaaatttaaaagtactggaataattgtgtgttcattaatatcacaccaacggcacagttgtcttgcaagcattagcaatagagtgttcgtattggctgatgccacataggtcgctttcttttgatggttagctgctcatgggaggtttttgtgtgtcacgtgttttttaatgtctttttcctagagagttccttttttgtggaccactctattgtacaaatttctgcttcttgaagcacaagcctctcgcattttcttgaaagaaaaaagaaatgttctagggtaggactagtgatccttgtattgtaaaagcataaaggaccgatgcaaacgacgacccccaatacagtcctatggaagaggcagtacaccatcatgcgcgccacattttgcagcaacatttgaatccgatcttccaatgcaaccatatagatcgatggcaatacacattgccagtatatcacgaagatccctcgtgcttcaaagtaaaaaaagatagatatatactggtttaccgcaccatatcttggtttcatttaacaatgacctatttattcttcattcagatccaacatgcacccgcatgttgaactatagtaaataaacgcatatgagaaacaaaacagtattttgtcctgagccactaaaattcttggcaacatttgctacagtacatttaaagtttgtggcctttgcggtgagacacctagagaacgtgtatcttctcgtggacactgtaaaaaatatggtaatcagctgctggacacccgcctcattattttattatttttggtggaaacggagagagaaacaatggttaaagataagtttgcccatgggcccacttgtcaatcacacatctggctttctacgttcctcttcttgctgctgggccgactcgccgcgtggacggaggacaaagaacgacgtgcccacgaggagggtgagggcattgtctctcgcggtggcgtcgggcaaccgactgcgtcgactggccttgaaggtgagggccccccatgggccgacagtgggacggatagagatgatcgggaggctcgactggcggaagatggcagcagcggcatgcgtcgggtcccccgtgggccgacagtgggacggatagagatgatcgggaggctcgactggcgaaagatggcagcagagcggcatgcgggaggctcgactggcgaaagatggcagcagcggcatgcgtcgatggtgggacagacggagtcgaccgggaggctcaattagcagaaggcggcagcagcagcatcctggggagggctcgaagcgacaaggggcatccacccctaggcacggagctctaggctggcatcgacggagtcagggtgtcggtggagacgaccctagggcgcgaaggacggtgattgcggcgggcagaggtggtgtactgctgatcgatggcagtggcagtgaggcgccgctagccttgacgtggtactcacgacggcatccaccgagaggctggccagtgacgaggagtccaagacacacggtgtggagggccacccgacaaggagggtgagggtgctgcttctcccgccgcctctctgccggtcgccgccccacccatcgtctaccccctccgccgcccactgttgcgctcacttgccaccactcggtcctctattgccagcagcctcccaagctcgctaagaaaagagaaggaaaagagaatataagcaggaagaatagtgtccaggggcatttcagtactttcaacactctttctctattttcaccaaaaataataaaataatacatcgagagtcctacaggtaattaccacattttttaatgttcacaagaagatatacgttttttagtgtctcacagcaaaggctacaaaatttaagtgtcctgtagcaaaatttgccaaaaatctttggataaaataaggtaccgacatcacagtacaataaaaaaaaataccgattctacagcaaactgtactgcgctatcaatccgaatcctgatacagccacacataacaagagaaaaatcttattacaattgcaggaaaacgagttaggcagagagattatcaaagaacttcatgtagtcatcaaatgactctccacgccgaatcttagcaatggacccatcatcttctacctgcattacaaataacagggcatattggatgggaaccaacaattataaacattgcataaagggagcattttgaaaacctatcaacaaatgatttcggatgaaaaatatataggtcagtttgtacccaatattcaggtggtcgcaacttcaagttgtaggttgaagccatgctcatgcagtaggctcctgcgtcatgaaccaccaaaccagctccctacaagcgcaatatgtttgtagggtaccaacaaggatatcaaaaagaaaacacaagatatggtcaaaccttatcaggtgttggaagttccctgtctttgccaaggaaatctgcagattcacaaactggtccaacaatatcgaatgttgctacttctgcatctggggaaggagaaaccagttcgatatgctgcaccatgtggatagagatgacaggtaaataacatgataaaacaacatagtacgaaataactgaatgtatatttcatgtttattttgaacatttgttggaaaaactgtatgcaagaaaaaaattgttggaaagatgttatttatatataggtcagatggagatgtaaagatcagagctaaacctgagaccaacgttacaatcatcatatatttatgaatggtgagcatcttatccaaacgaactcagctattatgaacaatggacaaaaccaacactctgcttgcaaccactatcagttgtatcactaaacaaacctggtatgctccatatagacttggtctgataagctctgccatgctgccatcaactacaatgaaattctttgtaccattagatttaacaccagtgaccctattgacgaagcagcaagtgttagctatgagggatctcccaggttcaatgatgagtgtaagatctcgtgacagaactaattctcgcacctacaaaaaatcacaggggcacatataagaatcacgccatatgccaaattttaacagtgcaaaaatccaaagtaggaagtgatctatttaaataaataatgtgcctacgaagatgagaatcggaaatataacatggatattgagctcacagtgttgatgaggtccataggtgtaggcaagactgcatccgtgtggtgataatctatgcccaggccaccgccaatattgagatattccagttcaaaaccttgtgctcgaatttcatcaacataattcaccataagacctgccgcatctctaaatatatcgacctagacaacaagaaaacaatatcatataccataccatgtagctcaaatgtattgtctaattatttgaacatggtctgaagaaaaaaaagttatttagcaaataagcataagcccacatctttaacaggggcttgtccctggataaacagaaacaaacacattaagtttgatgaagtttcaaagtcagcataataagtctttttgaatggacacactgctgcacagaaatagtatacacacaagaaaggaattatccctttctcctaatttcttcagtaagctttattcacataagctgcaagttcacaagcaatggagaatgggagaggagaggagagaagagcacgggttctttgatgctgtccatacccggtgctgcatccctgatttccattccccgaactgatcattatactacttgtcaagagaaaaacattacagcgtccaaaacacgaacacgatgctttccatcaccgttgctccacatccactgaaacaaaatcacgtcggacatgctcaccgatgtctcacccgatatcacatgcgagagccctcttctaagttaataagtcttccaattttaaatatttgtgatgaaccttagttcgttatgggataaacattacaaggtggacggctggaaatggatagactagagactatcagctgtacttaattctttaataatcaaccaatagtcagagattttaaaatttcagaggacttcatttagtcccagctgtactattgatttacaaggtggcacttagtttatctcagaggactgggactcagataaattcagctgtacttgcttgttaataatcaatcaatagtttcctgactatatagtgagcctcataacaaccactgctacattatgatgcaccgatacaacagaaaacagcatattcctgtaccagatatgtatccgagacaggagtacgcagtcaatacagtattgcagaaatattgatcatataatggcgaaacaaatcaaaactattagcaatgcttcctcgattcaaattagatgctcagatatgcagtcaagccaaccctcattcgaaagcccacagatggtagtctaacccaagaccactaacccttgttcgcacctgtgtgcgactgtgagtgctgttcccctcattctccacctccattatagcatcaccctgcctacatcaccttcagtgagcaacctgctcgcctcaactacaccatgtgtgcaggaggcttttctatgacaattgaaagttaacaaattggaaagatgtgtcttgatttaaatgtttcttatcaaacttaaaatgttttggataaaaaaaaaacttagggtgtgttcgttagtttggggttgggaacccatctccccacacggaaaacagaacagtccattagcgcgtgattaattaagtattagctatttttttaaatgaattaatttgatttttttaaacaactttcatatataaactttttgcaaaaaatgcaccatttattagtttgaaaagtgtgcgtgcggaaaatgagggaggggtgttgggaacctagaacaccgaacacaccttaaaatgttaacaaatttggtttcatgttaaatggtccccattttatcccattgaactgacacatcttagtttccagagagtgagacacagagggtaaaatgaaaagctggtccgttggagctaagagtctgacacctgcatgtggaggtactcatgcctgtgacttgaggcttgaaacattgaaaaaaacaaatcacttttttctaaaatggccagttcagaaacaagagcaaaaatattttgaacattcaatctagttccgcaaggtcagctatgccaaaaatctagttcatggtcattaacagatcacgtactatgttatttccataatgctttcagtactatacaattggatagaaggtaagtctcaaatttcaaaatgtagatgtttcagacattggcacagtaattaaggaagtcttaaaatgaccttgttgcccataatcatagcacattggaatgatatcttatttattcatgagatgtattcaatttacaaggggaatagaggaaaaaatgggacaggtacctaaaagtcatataacaatttacattttgaatcagagcagtgtggttcctataattcttagtgattgaaatgatctgttgttgccattcgcatacactaaaacaaatggcaacaataactttctaaataaactcaaatcaacaaaaaagcacatttttcagagcataatgcagcccaaaatgcaatttcttactagcaatttccaactgttacttaattgttctcaactagctagaagtatggattaatgttaatcatctgaatgccatattaacatgcttggatggatataacatcatatggaagctacggcgagacgaattattgtttgagcatgatgcataaaagcatgtccgctggctcagaagtacttacaagacattttagctcattgcacaaggattaatgtgtagaagaactccccttgcagctgtacaagaatgctgcagctgtacaagaatgcatgcagccatcacatgcttgcacaggaggggagaggaatattactaaccgagaaaaccctggcatatgctaacggttgatggttttggttaataggtttaagtttgtgcgaagtatttatcaaatggaaattccacccaaaattactttctcagaaaagcagaactattcttgaaaaagaatgtctaaaacgatatataatgaatgaagtggtaaccataaaaaggtacaactaatgcaaagcaagcagcatgttttttagtaaatttcacaagaccccaggtattggggcatccataacacaaaaccccagttattgtgatttgtttcagggaaccccatgtttcggggtaaaatgtttcaaaaaaccccatatttatgtaaaatactcatgtttcattattacatatgattttttttcataaattcacatttgttgactctcgtctagtttatttattttttctcaatttttcactgcacaaaaaaactcaacataatcataagtgataatgacataataattggttaagtatacacataaatgatcagaccacgatgaacaacgattattgaaaagcagctaacgtgtatatgtacttaaaaaatggcaactaatgtaaagaaatgcagcatgtcaggttttggggcactagcattataaaaccccacgttttgaggtttccttcactaaatcacaacttattcaaagagctcacagagtaaagcagggagaggcggagcaagttctacaatatagggctgtgactgcacaatggaagccgagtgcctggtaacagaggcaatgtgatcttaggatacaggaacctacgtttcgaggctccgagcctctgatttctggggttgtcttatcagctaacgggaacctaacaggatatgatggaactgagttttgtgatacatgccggcatgttgcaaaacatgggatttagtgaagaaaaccttactacctggggttttgttaaaatttacacttttttgtggcaaaaacagaaggcgagttgcctgtactgtatgacaaaatgtctgttgagcacaagatgctaaggtacaaaacaccaccacgaacaagctcaccataacaaatacctacttattacaactcaaagtttccaacaattataaccaaagaatagtacatcataattcatttacctttgtaatggtagatcccagatgacaatgaacacccaccagtgtgatatcatttgagtatgacttgatagagtctaagaaccattgtagtttctcattacggataccaaatttggaggttttgtttccagtcgcaacataaggatggacctgttgacagaaaaaaaagacaagcttgtaagaaataagcaatcttaagtttgctcctcaaaagaagattatcttgcttccagttcttaatacaattgacatgcctttttacaagtaaaaacaaagatactttcatacaattttaaatcaactgcattagtatcatcatacaaaagactatggaggaacaggtaacactatatgcacatacattattggcaaatttcgctacatgacatcgtgacttcgcggttttagctgtaggacaccgtatggagtgacttttgggggaagacactgtcaaaagttggatatttgctgccacatattacgtgcccaccagcaaatatccaacttttgagagtgtcttcccccaaaagtcactttgcacggtatcctacagctaaaacctcaagtcacgatgtcccgtagcaaaatttgcctacattatccattcaattaattaatgcaaaagaaatgccctagtgtctaatcaagtactaggttgctatattttaggacggagggagtagtacatgtttgataccgcgcacaactaagatcaataatcacctatgtagtacacaacttttttcaagaaaaaatggaaaacacaagggtacccaaaactatataatctgatttctagtattatatgacaataacacaatagcataccaatataactaaatcccccactgtatcctgaggtgggaggaaaaactttacctgtggatccacatctgggtttatcctgagcaaaacagggactttcttcccagcaactctcgcagcagtgacaatattctccaaatcaaattcactgtctatgtttacaaacactccgctctctgcagctaaaacaagatcttccaatgtctttccatttccattaaatatacacctgaacttaaataaatacttaaactagttagttactacaattttgtttggtatcaattgacatgaactgaagtacttatttgttacagataaagactttagaaaactgtgcaatctataacttggaaacattcatagatacgcttagatttcatcatggattgtcacctcgcatgctctgtgaaatatgaagatcgtaatttcttacactacattctgccatgtaaatttggctgtgctccttgacccaacacatggtcttaagttcggaccattttggttataaattctaatgcttgtgcaaacatagtgttatcaaaatcatattcacgagtcaagctctgtgaacaaaattggtagaattaacaaagttgcctatcatcgtaatatggcaaaaaaaatataaatatagcatattaatgaaccattttcatactactttcttccggtccaactattgcatttatatgtcttttgacactgaaatcggaccttccccagaaagtcactagatggatattttataattaacatgaagataaaaaaatggctagtgtccatggagaatagtcaaaaaggccttttgtccaccagcaaatcattgttcatttgcattccaattccaatccatcaaaaaatcaaatatagcgggagatagaaacgaaaaacgaaaagagaagaagatgcacctagtgggatcgaatcctgcccggagggcaaggcggagctcgttcccgctgacgaggacggcgccgcagccgagctcccgcaggagctgcagcacgcggagattgttgttggccttgacggcgtacccaacgatggagcggagcccctcgagggcgtcgcggtaggcggtgaagttccgcaccacctgaggcttgctgtagaggtagaagggggtccgctccgccgcccccatcgcgtcctccaccctcaccccctcgcagtacaggtgcccatcggcgccgcgccggaaacagcgcttcggcgcccgaccgtcggccgccgccgccgccggccgcggcggcggggacggcgctgccgtggagagagaggcgcgaacggaggccgtcaggccgtggcggcagcggagagatacggccgaagggctgacgcggttgctgtggctgcttgggttagggtttagagcagggaggagcgcgcgagagagaaggttggccgccgccatggctagggtttagggtgaggtccgcaaccagtctccacttctccagctccagccagcaagggagctctacaaaaattcggtgcaggctgactatgccgaacttcaatgggctgggctgggcacaggtttcagaatgcgatgaaatgggatggaataagtctatttcacgtacctcaactcttgcccttggtcgaatcgtgttcctcaagtttaaaaaccggtgcaaatgaactcattgattgttagggaggtgatttattctgatgtggtaggttgacttagtctcagtcgtcaaatgaatggaaggtaaaagtggatcctacacgtaaaaggtaaaaataaaaatatgtggggctcacttgtcagcaccactacccctttcaattctgacgtgtcgttgccatcggaggaggggcagtggtccaccgcggcgattgagcacgcggtagtcgggcagaagcgaacaacgacgacgacacaggcccagcgagcggcgagccgagctcaaggaagaaagagggatggggaaggctcccaaggcggcgacgcacctcgacccccacggcatggaggccacctgcggcggtcggcggcggtggcagcaacacaaagagcgtggcgacaacagcactgttggaggggatcgcacactactatgaaaagcatttttccgtgcggtcaaaataatttttccgtgcggaggacttgcccgtatgcagcaatacgtctggaaaaatcaatattttcgcgtgcgggtggcccaaccacatgggataatcattttcccgtacggtcgggttaagttgactgcacgggataatcgattaccccgtgcagtcaaattataccgtccgcacggaaaaaaacaaaaataaaaaaaagcaaaaatcgccgcgggcgccgccgcgaccagcaacagccggccggcgcacgtgcatgcggagccggcggcgccacctcatcgtcgtcgtcgtcgtggcgcccgccgccgtattttggtcgtagaaaccgaaacaagcagcaactgcagtagtactagttagtagttacagccatagaaaccatccgtaggaaaatcagccgctgccgcgcgtgcacgcggagccggcggcgcgcgcagagagagagagagagtgacatcaaagaaaggagagagcaagaactcaagcactggctatatcggcatggagaaattagtagcgcaacagcttcaactaccagaacattagcaatagcagccaccaccagtggtttggctggggattcaactcaagcttgagagaaatcatcaagagactggaaccagtagttcaacatcacaaccacaccactttgctgtcgtagcagccatggagaagaaagagagtaggagatgcttgagatctagcgcgtgcacgcggagtcggcggcgccgcctcgtcatcatcaagcccgccaccgagagccgcgtggggccccgccatgcgtgcacgaggagccggcggcgccgcctcatcgtcgtcgtcgtcgcgcgtgcccgctgctgagccacgggccccgccgccatccgcacccgtagcgcgtgcaagcggagccggtggtgccgtctcgtcgtcgtcgtcgcgtgcgcccgccgttgagccgcacgggccccgctgccgtccgcgcccgccgcgcgtgcacgcgaagtgtttccgcaagcgcacggatataccgatgtagcacttctccatacggagtattctaagggtatcgaatccaagggaacgtgtgtggtcagatcttcctccagttcatccaaggacaccaaccagggaaaacttaattttaatcctaacgcaatacttcaggcactagcaacccgctgttcctagatgcaatacttcaggcactggcaacccgttgttcctagatgtcgctctactacgtacccggacagagaggacttaagtgatctcgagggctgtcaccacctctacacccacctcaaacatactgtgggatacgcagcaattactggataacaactgtctgaacactatatctaagcaattactatctactttagtgtttataactcaccaaagcaatcactatattttagttgattatagtagacaataatcccgtatgctatttagaaactaaccatgagataattctcacaagataaatctaaattacttaagaagaatattatattaaatttagagtaataaacggaataaaagaaaataggagaagattaccgacaactccggaattcttctgacttcttctactctactctcttcctattctagtatacaatatagtacaatagagcctcttataattaagctcaagcttggaagtgtgtgttgaagtgagtgagatgatgtccttatataggggtaggtatgacggttggcgaaggggaaatgtccgaagtgccctccaaccgtcattagggatgcatctgggacgtccacgccaaaccccacatccaacggtggtggtggtggttcggccgaaccagggggtttggccgaacctgggctgggccctcctggcctggccttcagcccatgttctcccctgatccttctctattcattcttcggtattttgggtcgatttactgatgttttgatgaagttcacaacccatccttgcagggatacacatttatcctcactttagtctgattttcctcccagcatctgagtttatcatctaaatacaaatatataccaacacttgtggaatatgtgagattaagcacctatcactatgttggatgttttattatccgtactttatgcagaatttggcggtatagaatcggcatttaattgccgccaacacggagccggcggcgcgcgcagagagacagagagagaggagagagaggagagagaggggtggggaggagaaaaggaggcagagagaggggaggggaggagatcgaggagagtaaagaaggagagaaaataaaaaggaaaaaagaagagagagtgtgaaaaatttgaaatgggtgagagagaaaagagagagtatttttccgtgcggtccacttaaaaagcccgcacgcgaaaaatgatttttccgtgtgatcttcttaagttgaccgcacgggataatgagaattatcccgtgtggttgggttaagacgttcgcacggaaaaatgcattttcccgtgtggtcgacagtttcgcgccggtccccccattttttcgtgcggttccagttatatactgcatattaaaaaaaggaggaaatctatcatgtatgtattagtggtaagagcttgacaagttgggcggagagtgcggtaggggcggaggccagcggcagcagcgcggcagggtcggtggcgagggaagaggctgacggtagcagtgcgaggggatggaggccagcggtagcagcgatggatgaggaggtcgatgggcgtgagcggccccctcccaatcctgtggtgcgacgacgagcaagcggcggcggcggcgccctcccggactgggcgtcgcgcgcggcgctaccgccagcggcgttcaagaatgggttgtatgtcagtacatatgaaccgccataacttgttggccttggcattgaacctttatctgtcgtcccctcttcacaaatctccgccgcacaccgatggttgtttctgttcgttgtacacaatgtccggcttgattccaagctgctccgtcagtgcaagaacctgtgagaactaagaacccaagatgcagattaaaatcaatttcttttactattcttgagctagcagaacagcgaggagaggatggtttagtgtttgtgagctcggggcgtcaacgacgtcgggaatggttttagtgtttgttggcatcgagaaagcccgtgagtagggtgttgaatgtgagatggagaaactcaactagattggattaatcacggagtgtttacaatactagttaagtgctcgtgtattgcaacggggataaaaatgttttaaagctaacaaagttcaccggtttgctaaactacattctagtgaaaatacttacgattttgaatttgaccatccaatcaagcaaatacatttgtctccattcataaattctttaggtggaaacaagatcttacatattggtgcaacgaagtgatcctagcatgaaactcgatttattggcctcaacccaaatatattgccagttatatggatattcatgttgacttcctactggatatttgacatgtagttcttattcagaactgctcactatactgattcatgtttgaaagtactttggcactgttatattattgctactaatgacatattttatgagaaaacaaagctcaaagtttacaaactcacgcagcaaatcgatactaacccactcaaggtttaaacactttgattgctacatcttactgcatattgtccaatggtatccagtggttaatacaacaagaataagttaattgcaatgtggaattgttcattgagattgttgaacatacaaatcaacaatgatcctgatcctaatcttctttctaacttcagaaactaactgccaaggcattttaaagaaaaacataagtctaggcagactcatttcgtcaacaaaaccattcctttatatttcaaataggcagtgtcaacatttcacatacagctgaacaaggagattttgcaatggctttttatgtcctgtccacccctttggcgtcaagccagaatctctcctgttgaggaactgtatattttccatcaagttggatttaaagtgcatctcagatgtccttcatccaaatcaagacccttgcagcttcctcttttgccttcgattcaacaacacttctatgatgacactccagcttccaaagcagttcctttttacagctctctccccctcaagatatgccagggtacactcaagacctgaaacaacaggtattctctcacactaaagaagctttgtaattgcttgccaatgaaacagctttgtaattgcttgccaggttttttcattggctaaatctaacagtgctgaacaactggttctgctagcacataagttatccctgaaacaacacatctcatgttataaaatggcctatttattctcaacaagtatattggtcatttgcgtagataacatatgaatttgaaataggaagcaaccatggcacgaagtccagagagttttatatagtagctaatagagttctatatagtacagttattggattagaaataatagctaatagaaacgttgttgtttggtaggtgacgctgtataaaacagcaagagcaaatataatagagtacaagcagcaatatataacagatagacatgaacaaagagcgaatataatatcatttcagccttcttaccatagaaatatacgaaattattgtttgattgtactaaccaaattgtccatgtccaggataataacaccaaatatatccagagttaacagactggtaatcaacacatgttgtttctacagcagtggaccacagttgatctctacatgaaaaatcatgcaagtaaataatgttctgaaaacataccttcaaatcctttatcaatattctcaaaaaaaaaagtctgactacactgacgagcagcaacaacggttctttgaatttcagtgaggcaaggaatccaatatccaataagtaagattgccattccattgtagcattataaaggaaacagtaaccgatgagatttttttcagattcagagatatagtcaataaaacagttagttttctcaaaattaagagacaatgtgtattgtccattgaaataggccaagggaatttgctttctcaccgtggcaaatcgatatccgtctaaaacacataaaagatctgtaatgtgcccgtgctaacgctacggtaatatttagtaatgcaaatcaaataatttagaaattgtattcttgcccttacttttcagttcaattgtgattttacccttactttttagggtttgtgattttgcccctactattttgaaatgaagcaaccatctgcccctggttttgacggtagttaggtgggcccaaaattttcgaattaaataaagggaaaaattatattttaatttgtgaattaccaacgtacccctaatttcagtaaataagtcaatcacatgtgagaatcaacatttccccgatcgaaaaaccctagatcgagggcagtgcgtgcaaggaagcagcggcagcgatgcacagggaggcgcggtggccggcgagcaagcggcggcagtgacgcggcggcctcgccagccagagcgcaggaggcgaggcggcggcctcgctggctagcacgcaggaggcgtagcggcgtggcggcctcgcgggcccggcgtgcagggcggcacgatgtcctcgcggtccagcttgcacggaggtgcggcggtgttaacaaccaaatttggtaatctgagtatcggagatgaagataggagcggagtaggatgcaagatggaaatcgttccggaaacagagcaaggatcggctaaagtacgaatcggctacgaccaggattggcagagtccgagttggacaaggttagccgattgagccaaatccaacaatatgacacggcatacgttgtcgggttgagttaatgtgcttcatgaagattgccatgcatgggtagagtcctgaaaagacaattgtatctattaattaggatatttcatgtaattttcttagagatatgtttaggcaaaagtctgccgcaaggacttatggtatcttagagtttgttagagataagagtcgtgtccaacatggacatattttgtaatctcgggtataaatagaccccgagccccatggaatcaatctaacacacgttcaatacaatctcggcgcatcgccaccctttcgacgagttcttgttttcgagttgagctgcatcggtttcgatcttcaactataggtaaaacttgttatgacgacttacgttctcgggattagtgcttccatctttatgatactctaatcttgtttatataattcattgagttatcatatatcttatgtaatctttggcaatatcgctatctaaccttcaattggctaacgtctgttgccagaaggcagccgatcaggttaaatactaacgttgacttagattatataggatatctatcactctataaaacatccaacagcttgattgtctagatattatccttcttttcatacttatagctgcatcagttgagtttgatcttatgagtcgtgattagaatctcaatttctagcctgcttttggttgctgattagggtagcatcggggtttcagccaatcttatctgatttaaccacttttatcttatatgctcgattgacatgttaaatctgccctttatgttaagatcttgctgcatttaagtatattaggcttttgtttggtatattttgcttgctgtgatatcttaatatagagtggtatcggagtattagctgatacatactagatctatctgatcagctatgctatgaacatatatagtcttgttgttagtatatatttcaatccaagtgattcatattgtctaggcatggcgaccgatctatcccaatcacttgatttaaatatatatcgacataacgattatatattgttaatatctatagccgatcgagtagatttagtcctttcttacttattcatgattgccgatcgatctacatatgacatcggctcaaagataaatgatatgtcatcggcaactagccgatcggctattgtttatggatttaactgcggtttctttgtctttatctcttgttaattgcaggatcaaatcaactggcacactcacgaacctaaaggcaagcttttggacatgcactgaagttaagcagatctcacatgcctcgtgtttttacatcaataggcagccgtgaggccaatgcgcagggaggcgtgcggcgactccgtcgacgactgcgtgggcggcatttgattaggagacctcaagtagttgtgtgaattccacgggtggccgaccgtcgccggggctgtggatcagtgctgctggaggcaagcaagtgcagaggcggcgggcaggcttgcgcgtggatttgggatttttttttttttgcttgggttctcctttctttttcctttttttgtgtgtaatgtctttgctcatgaaaagatgggtaataaattgatttgtttggacaattggtcgccttcttgtatatatgcaacttatatgttcctgaaaaaattggcaaaaaattgatttgtgtggaggtgccatataatctcaaagttaaagttccagtatgtatgtcagatccatcgctggatgcattgacacaacggggcaaaaacactgcatcctcacaaagaaagcaaagggcgcacctatctttctactactaaattaacaccgtgtgaagaggacttaaccgagtaggggcaaactgaagcttcaatttgaaaaaacatgggtaaaatcacaaaccttaaaaaaaaggggtaaaatcgcaattacatcttgaaacggggcaagaacacaattgcctcgtaattaaaagatatatataccttgacaaaacaaatcttaaaatatcttaagtccaaataaccaagcaaggacatacattattgtaataaattatcctaaaaattaattttatattgctataaatttattggaggctagaaagaattactaacatctctgcgggcttgcttctcggcttcacttgatgccaaaggaaatcgatcaaatatggatatttaaaatatccataaaacaaaaaaagaagtttcacaaagcgcatacaaaacagtccataaaactgaaacttctttccttgccatagcacacgggctttctattattacaacctgaagcttacaaactatcgacaaatttaaacaattggaattttcatcacatgagttaatagccaaaaaaaatattgctgcatgcttccactgtacagtaaatagattttggatgaaaatcattaagatggtatatggaaaggaagttacaaaattgtatatgctaatcaagttagaaaactcatttctcatgtataagtatgtgaatgaacttacgatttacaatgagaaccatgtatatactaatcctgtaatccaccttattctttgctctaatctcttcctgtaggcaaagtgatctctctttgttagttcatagatcctttcttcctatatagttgatacccactggctataaagcttgctccgcatgcctccatgtcatcagccaaatagagcccttggattagagatcactaaaaatcaggacctttcgatattacagtatttttgcatgtctagccgaataattgcctccttcctccgagcagccgaagcgcatccccttcactacgcatggtgcagcgccaccaagtcctgtacgattctcctccccttcctcttctctaaaacctttggttatctccccaaattcaggtaactgcaaggcatcaactgtggcaattaaatcaattatcaattccatcaacacacttgagttttctcatatatcgatttcttcgacctgcatccggttcctggccgtagatgtcttctcacagtgtttgggtatgacttgagatgtttatcttcatgtttcctttttctcaagttcttttcttctacttttatctaagccccattgatcagcttattgcatcggtttggtattgtttgagctaaatcatgtttatacgtgcagagcgtcagcagatttggttcattggtttcgttcaagctccactatttcccaattagttcttccgctgtataggctttgcactgttcatcctttgtccgatgtacagttaggtccttcatgctacatcttgcatgcattcctactttcctgtggattttatagtacttgcctctaaatttcaccttcagttttcagttttattttctttgatgagatattttttttctaatgcaaaggtgatttatcaaattttcagaactgcaatacgttattctctgtttaattcttattatcggactataccatattatgccagtggcaatcatatcaagcacttctaatattatgccagtggcaatcataccaagcacttttaatcaaagaataaatgaacgcaattctcagcagcgtacagcatcaggcatattctgctattctataaatgtgtcccactaacctgcatttaatattgtctatcttgcaatatcaatttttctaagtgaatatcttgctaccaatttacatgggacttttactaaccatacaaaacacttctacgttttgcaaatgaactttactatttcatcacacttctacattttgataatgttttgcctattttcattaagtactgttattaccaccctacagggtgactttcttggatcatgtcatcaattatgatgtattctttagttgttgtttacccacatacaagctctgatgcccaatattcagctacatgttcagctaatgataaagtgtccaatcataggctaagtgccattttgataatgttttgcctatttttatcaagtactgttattaccaccctacaaggtgacttttctggatcatgtcatcaattatgatgtattctttagttgttgtttacccacatacaaactctgatgcctaatattcagctacatgttcagctaatgagaaagtgtccaatcataggctaagtgacatttcagtgtacaatcataggctaagtcacattcttatgttggacactcaattgtacatgtttttaatttcaggcttgaatatgatctgctaattacacaatatccattgcctccatggtttgtaactatctgctcacacttttatgaaccccgcaatgctccttcactaatcaagtaatcactccagttggtagctagattagggtttgaacggtacttaaaaggagttcagaagcagcacaccacttaaccaggtaaatgcacaacaggtaaatatacaacagttttttttgttagagattcattaattgtgggaaattaagatgttcaggaaatcacacattcacacttgacaagttgatagctacttctagatatacaaatgcactaccgctgagctgagatctgcttttttcaatgaagaactcccgttattcgtaccagactacaggtatatatttgtacaaaacatttatattgcccttcttcagagttgtttgcaccgttcctacccctaattgattactttgttgtgtaatgcttgagcatttgtcagcacttaaaatatcatgatcacttcttacaaatcccacagcaacacgcagggtatcacctagttaaatgtaattgagagaccagtcctcattcattggttgaacttgttgtaaatattttttttaatttttaatatattgtttactgtggggcttcctctacagtgttttgctaaaaaaaaaagagatcagttgaaaaagaagtcaaatcctgaggttattcattgatcatttgtagtggaatttataaaatatagaaaaatgggaaaaaaaaactaatttgataatcagatgtagagatgagacaataacctgaagtcttgaacttctatgttttgagtgcgaattatgaatcatgtgatgatgagcttgccagagttcttcttgcctgggcaactcttcatgatggtggcgttgaccaaactatgcaagtttttgcattgactccctgaaattctactcaaaatcactaaatcagcatattatacaatgaaatataatgtaggatttcttttttttaaaaaaaatttattttagaaatatttttttttcaaaaaaaatgtgaaagtgcgaagatgagactttttttgaagattacccctatttccattaacagaaacaacattacagacaatggcggagcttcatagactaacaagaagtggccattaacatgaaatataatgtaggatttctacataaactaacctgttaaagatggtaatcaatgtctatgaagatgaacatactcaatatagtgtatttgcatgaagctggaggagccataacccagtttatcctccacgaagctctgccactgattacaggatctaaaaatagggtttctctgagctctactcctaacagatgtcttgagtactgagtatcaagaagttgaaatttgatacctttttatctcaagagcctatgcctgaaagctgtacagattaatcagaccgaccatggccttactttgcccatctaaaagctgcatctgattctccaatgatttgccacctacagggctggcacacgcaacacaatcaaggcagcaagtatcgatggagaaatttatctttccaataatatataagcccatttctctgctagtaaagttctcatgtcatgagctactttactttttgaaaccaaagaaactataaatcaaaaaacaaggtagagatttgtacatcaatttcctagtcaattgagctattgtccttaagaccctcaaacagcttctccctttgttatatacgccttcattatatatgtctataaaaaaacacccaacagaaggggaaaatttatgaatatccctgctagttggttgtgttacagtcttgaaaagcaatattttgctatgtccaactaatttgagaaaaaaaaaccattctgaatgagattatgtcgagagcagttgtgaagttgaattgttcagggatgtatgaaaagaaagcttaggtttgatgcaacaaatatgtgtatatgtaagatttctggagtatggattctgaaagataacggtagacaattcaatcaatattttatcacctaaagatcatatgcataatagttcgatgaatacacaccttcatattactaacgatcgccatgacttggcacacgtacaagtcgttgtgtggatctaaaatccagaattcatatgcactctccagaacacatgatctcggcattacaggtgtggagatggacatggaagttcgcgagcaccccacgtacgttgtactctgtggaagagcgacaaggactgcatgatgagttttgtgttcaactactcacctctcacaggaatcacgtactacacccccaccgacgaggacctccacacctgcaactccccccattggcaagcttctctgctctgcgtgctggtgagcttccccgcgccgatgagaccgagcgagatcccccatgtctgctgctctcccaccgatcttgaggacggagcgacggcgaggagacaggggacggcgacctggcagtgggtcctgagggcggcgtcaaatcgcaggcgggagcggtaagtggtgggaacatgtaacactcgaacatcacaaagggcgacctctcgcgaacaaagtgtaagtcgatttcgacgtgcttcgtgcgttgatgctgaacacgattggccgagagctaaactgcactgacactgtcaccagtgtgtcacatcctgaatttcgtttcaggatttataaattatttaataaattattcttagaatttatattaaatattaattaatttacaagtgaagttaaatgtgggaaataaaattttttaaatataaagcatggctggatttaatttttattaaattctccatgattaattatactctctggaattttctcggatttttcggagctcaactcctaattttaataatacaaatagcattttagcaattatttaaatattaaattagtcattgaatggtctgattataattgttaagtactttgagtgtccaattattttcaggatttttcttgaaattatttgagcattggaagtattttaacaaagatcatttcaatgattagtttaattggaaaaataattaaaagtccctttttccttttcgggctgaattgggaaaagtcctcactcgctcttggcccaatctctcccttggccgaagtctgatttgtgtccctcctccttctttctctccggcacctggggcccactctgcacagtgccgtcttcctcctcctctagccggccgatctcatcccgtgccatgcgttgccgcgccgcctcctccatcaaatccggtgcatccattgctacccttccgaaattgattgcaaaaatggattcctctcgatctcctctatctaatcccaagaaaaccccatcaaattcgttatctatcccatgaatttcggcccgttttttatccgggtgaactcgggataaatcctaacttccttcatcgaatccatccgttcccgagccgatctctccctcttccggctataaatagcagcccctcggcctcttcttcggtttccccctgttacccgaagttttccctaaccctagccgcctccgcacgctcgccttctctctccaactccggccaccatctccagccgccttttcccgtcacgtcggccgttcccgatcagtgccgccgcttccctccgctccgcaaggttgatctctaccccggccaccggtttccctccgccaaatcccgccggaagccgctatcaccgtgaaggccgagttcgccgcctcggtttgatctccagccgatcctcctcactgttgcggtcgttgctggttcaccccgaggccgtcttcggcatcgcagcgccaagccgaagaccgtccaccccttctccgccgctgcaaaccatcggagcttcatcgtcgccgtcaacccgaggcaatcatccgtcgccgcgtcttcagccgtgccgctcgtcgccgtccatcgccgccttcgttcgccgtcgccacccatgggatcgcagaagcgagaagaagcccgccccccctctattgctgccgtttcccgccggagcaccgccgccatcgatgacccgaggtcgccgccttttgaagctcgtcgccggccgttttccgtcatcgattgtcgtcgccgtcaccaccggtgagttcctctcgtcgtcctcatgacgtagatgccctcagttggcccggccgagtcctccatcgccggcggttgtgtggtccagagccatgcctgttagtgatgtcatcatgacatcataaattcttaaatttaaatcgtaatggttttctatattaggtgaaaaactgattaaacttcgaaaattcataattaattcatatgaagttggaattaagtggttcaagttgctaaattcatctaaaatcatgatctacatgtttgtttactttttatgtattatttatttggtttttattagttttttttgttttgcgtgttagcttgtcgttatccatcgtttcgaagagtcatgagtgcatcagaaaaattcaagaagactaattgaagaccgattattgcaaggcaagtcacaaagatcccaaataaccctttgagcatgttgaacccatttaaagctattgtttcatttcaacttatgcattattttcgaatgtcatcgggtggtgagcctttcccaaataattatgaccgaagatgactttatttttctatggataataaattgattagctcgaaccttatatattggtttggttcagctaaatgctatatatataattgcttagccatgcttagctacattagctcattaatgggatgaatcatactacattattatttatgattatattaaatggtagctcatgatggttaatcatgttatgataattaattgataattaaaacttgataatggtgggttgtgagcacatggttttgaaggtcgtgatcatgacaattaaggatcggttcacgagctactgttgtgagacattaatcgtgccaaccacaagccagcgtgggcaacagctttaccttttgtatagtatggctcattgcggggcaccagactgtgaagtggtgagaagtccgtgggggtcgctggggagtccatgcctctgtggtggattgtgttgtgcgaggggtactgtcacaatcccgtttcgaggtatcgtggtggtactaagggcatggtaacatgttttgaggctctgtgtcttgtgggtatagtggtacacctctggccagagtaaaactatttgaatagccgtgcccgcggtcatgggcgggttgagcaatgtttttcgtgattagtctcacacctctcacaataattattgatgctataactggtaataatttgcttagcttctggtttggagttagatctgtacagccgggtatggttgttcaggatggttgggcctgagcagcatgggtgtgctgttcagtgttgattaacattgattaattactctactattttacattctcaaatatttgctaaatgctgcttttgcaaatgagcctatattatgccatcctttggtacccttgtgtgtttgcatatttgttgtgtggcttgcggagtattccatgtactcactttgcaataatcaatcaaacctcagttgaagaaaaaggatctagaaggaaaagaagtttggtttaaaccctagttgagctgcatgtgtgagtggagctgaaaccatcgctagtccgttattccgctgctgtttttcttttcttttgtaagtatgtaactgattgatttgtatattaaattttcagtttgtgtacctcggctgattcctggacgaggattttatgcacaaataagttcggaaattactagtgaattttcgggcgtgacaatagatatatgagggcccacacgttatagacacatgagagcccacatgtcatagacacatgagtggcaaatccttaattgccatattttaaaagtggcaaatagttaaatgacccgtgatccggaggagttacgtgatggtggtgcgaaggagattgcgtgtggagaaggagtatgatgggatcgttctgcagcgtccgattttctgatccactgttaattgatcacgtgtctatattggcttcaccatcactagactgagacgaggtaggaacatgtaacactcgaacatcacaaagggcgacctctcgcggacaaagtgtaagtcgatttcaacgtgcttcgtgcgttgatgctgaacatgattggatgagaggtaaaccgcactgacattgtcatagtacaccagtgtggctttggatagaggggagtgcagctcacataagagttgtcgcaaccaactagcctcggtaacaacattggcaacagcatgatactcggcctcagcactcgagtgggagacaatgttcttgcgcttggaagaccaggaatccacatagccggaggtggacttgcgagttgacaagatcagcggcctgggagcgctagatttgaagtccatcatccagggtgccacggatgtaccgcaaaatcctcttgagagctgctaagtgagattcgcgaggatcaggcatgtagaggcacacatgttgagctgaataagagatgcccggtcggttgaatgtgaggtactgtagtgctccagcaaagctacaaaaatctgtaggatctgccaccggcgcgccatcagtggatgatagcttggcctaggtgtcaactggagtggaacagggtttacaatctgcaatgccagcacgctgtaggatgttgagactatactaccgctggtgcaagagaaggctagaagtctgttgtgtgacgatgatgccgacgaagtgatggagagcaccaaggtccttcatggagaactcaaactacatagaggagatggtccactggaggagctatgcagaggaggcagtgagtgcgatgtcgtcgacgtagaccaggaggtacactatgccagaggcacaatggtggacaaacagtgaagtgttgaacttggtctcagagaaaccaatgggcagaaggaatgccgcaaacctgttgtaccaatagaggaacttgttcaggcggcaaaccatgtctagccgagtggagtcgatgaagctgggaggctggatgcagtagactatctcctagagagtgcaatgaagggacatgttcttgacatcaagctagtcgatgggccaactgcaggagactgccaggctgaggacagtgcggatgtgttaacagtgaaatttggtaagccccgaagtcatcttcggcctagattcagtatcggcttcagagtccttgaatcggccgatgggaattatcaagtcgccaatagttgtattcttgctatatttggttaaggaaattaatcaattaaaggaagtttatctagaagaaaatgaattcaaggaggatgcggcatgagagtttatctattaattagggagaatctgttagtttccttttttctttaggaaagtatgtttcttgtccactaaggactttatgttttccttttatctttaggaaagtttctttcttgtcaagaaggactagtatctacctatgtgtataaatatgtacacccagggtcattgtaaactatcttacagatcaatacaagtactctcgttgcatcgtcactctcttttccgagatttttacttatcacggcggaacatggctcctaatgcggggatgcatcagctttcaatatctggtgaaggggtaagtcctatgttccgtcggccctggcaattgtattagctacattagtgttgctcaaggttgcatcgcttcaacctcttggatcgctctggttcggttgatatttttgcctacctatttatcatatatcttagttaatctagtttagcatcttaatttgatcatatcggttgagagtcgtcttagggtttatgctagtatcggctaaattatcatgctagattagattaactaaggtatccaccaccctgaaaatttgccaaaggttgattgtttagactttatgtttcttagcatactttgcgatgcatcatccctagtcatacttagaattataaaggctaacctgtctttgattataataaagggtttcatcggggtttcaaccgatgagttatctggatgttgcatcggcttataatgattacatacaagttggtttcgccgattgcaacaaaggtttaactgattatctaatcatttggattttatgacaccggacctctagccgatgtatgctttaaccatcggatcaatatttgttctatcatatcattattagtcggttggtttctattggattatattgttgcttaattacattattatcaaccgattgtctatatatcattatttacttaagtatcagaatatacattggacatatagccgattgctcaaaaccctatcgacattagttggtatcggcatcggctagtatcagcatcggctagaattactccattggcttgtcagccgatcggctatttcatctgttgtttgcacatgttgacggttgttggatcaaactaactagtacgccctcatctcatctatctttggacctgcattggagttaaggagatctcctcggctgttgtgttcgttgacttagttcacgccaatatagttccggcactatctgccgagcgtggatttttcgtcaacaggacgggtggccggcttgatgactagactgaatgtcttgtcaaactcaaaccgttgagggtgttgaggatgagggagcgatcctggacggggtagctgtcacacccggagttttcccctttcccttagtttacaattcatcaataaatcgcccaaagaaaatgttttgtttaacctggagcaaatcttaatttaacaatgcgagaaataatcggaattgtaacataccaagaattctttgaagctaaaaaaaaagaaaatgaagaaaacttagcaaaaatttgattttgatcttgtccttgtcatttgaagttaattttggtgttcttggattttccatgcacctcataacgcatttgcatgcaataaacataacaaaaaaaactaattaaaataagtggtagagacttgaaataacctttcacaaatctcacaagttttgcatctcaattaaaaagatgaaagcatccaaaatttgattcaaattaaaataaaaacagtgaacttgtttgaattttcaaaaaataaactgctcttgagaaaaatccccaaaatttaccaagtggaggtcttgaccagactaacctctagaaattttagcacaagcttttgagcacattagcatatccaaaaattaatcaaactctcagccttcttggaaatacccagagagaaatcccctcacctcatcccttctcccgttatctctctgatcagtgggcctaaggatcattgggcccacctgccagccaccatccccatatccctgctctctgtctttctcccttctctccttctatttctttcaggcaattcatcgagcacctagcgtgcgagattgaggtcatcgtttccaagccgaccaagcaacctctgcccacgattctcgctggcaaagatgaggcaaagctggtgcacccctgcccgaggccctaccgctgccttcgccgcgtccctcgctggctcgcccaacccggagctcagtggcggatctagaaaattgattcactggtgtcataatgtgtctatcggtgtcatagcatgctaattatacttatattagtgtgttataatatatggataagcagtttaactattggttttgccgaaagtcatcggtgtcgcctgacaccgatgctaacactgtagatccgcccctgctggagctgccgctctcttgctctccctctctccctctctctgcccgagcaacgacgcgacgcgacactgcgccaccctctgcccgcgaatcccgctgtgccaaggctgcataaagccgacgccgtccctgccgattccctgccacgcccaggctccgaccaccgcagccgccgtggccaatccaacaccgtggccctctgcccgatgccgaccaagccagaccgacgcagccttcctcctctgcctcctccctgcgcaaagccgatgccgctgcctccgtctgcaaagccctctgactcacgtctgcaccgccgatgctgcgcctggcaaagccggcctcgccgcgcgcctcgccaacccggagccgccgccccctgccaaagccgacgcacgaagcgacaaggcgagaccgaccgcccctggctccccgtaactatccctgcaccccctctgcaatccctgcgcaaagccggcgcctgctgcaagccgtgttccccgccgaccaccgcctgcgcgcgcgagagacgccgagcacttcgcgacaattccccgcacttgcctctcgctccttcctcgcgtataaatcgaaccctcgcgccagctaactctccacaccaccctcaacctccactcccaaagccaaagacctaaaccctctgattcgctgggaacggccgcgccaccgtcacgccccgcgccggccgaacagagcgccgccgccgaacccacaccatcgagccgtcgcctcggtgagttccctctcgattcctcgcgccaccaagatcataggacctccctaaatccatttccgcaatctattttaggacccctcgaccggagagccgccgccaccaatgtcgccgccgaccgcctagggagctcgtcgccacgccgcctcggaccgtctccactccaaccacgcacggggtaaggattctcgtagtccctagaccctcccctaggaaggaatcgaattgctgtcgatcgtagcgcgctagccgtcgccgtcccgaacctaccgccaacaccggccatggcgctcgccgcctccagccttccccggccacgcctccgcctctagggtgtgcgaaaggaccactctagcttccccggccttctgccgagccatccccgtcgctgctcgtcgccggcgagcacttcccgagccaccgcgcctctgccaatcgagctgcctgtaggttgaagaagaaggaacttgtcctgtaattagggtaaattatagggctctttgtgcaaaaaaagccacacactgacaagtgggacctcggatttatatgtaaataataaaaagtatagggttatttacgagacacttacatgtggacccacggttttaaaatgaatacacagaacatgaatacgctttccctgtaggaaaacgtaatcagggcagtgcgctgtagtttctttataaacaaattaataaatctaagaaaatggtttcggttaattatttatgcactataaaatgctgaaactttggaaaatcatagagaattcattttaactccgattgaggtgaaccaaaatttgttagattcataatattgttctcttgaagactgtacactcaaaattatcaccactattgtgaaaattttcactaaattaagtttgaatagtaaacttcgtttttatcgtatattagatattagaaatgcaataacttgcacatacaacattggatttaggcgattctttctcctaaatttatattaaatcatcctctatacactgaacatgttcatgcaccatgcatcatattttatcttggagttttattggatgttcatttgaatgcatgtttaaatttaaatagaggacgaatcgattgttgccgttgatgggagtgcaggactaagagatatttgagtaactcctaatcaaggcaagtcctattctattcctccttcgatcatgttgaatccaatatcttcgcaaatgctttattattttataaattgcatgcgatgttttataaaaaaaatggggtatcggtagaaatgacctatatgctgcattacctaccttgatatattggttatccttactgttgaagcactaggatgggtatttatgtggtagtatccaagcaccaccgtgggtatattcgagctactaatatagctattgcttagccatgcttagaaattcccgatggttacttatgacatgatatttactctttataaatgggataattgaaaaaaaatattgtatggaggggttgcctctgttatttttgtgaaaattgaaatctgaaaaaaaaaatgatgattttaggcttgggcggcaagtggtgtgcatatggtggtagttgcacatcgataggggggagtgtacgcccgagtcgattaaggactgaactatgtgtcaccaactaagattaccgtgcaaccacatgtgttggttatggggcgaccttggcttattaagttgtttactgtttagccttgcattgggaggccgttgtagtagggactagtctgagcgatggttcataggagctacccatgtgaccactatgggtatggttgtgttcaccatatggcatgggcgtctgagcatatccaatataacggatagtgccttgttgagggaacggacaccctctcctgattcagccgattgcctctattgtaaggtcggcttgaactccctgtgttatcactgcacccagggcaatcttcgatggacgacaacctcatcccctcattccagcaaaatctaaagaactcacagtcccaatgaggatcaaacccgccatcatcttcttcgcaatacctctcctgctgcttgtcataccttctttgatatttgttgataatcctggttgaattcaactgagaagctcgagttttcctttcatcagctgatcttccagctgtatgcaccatattaacatggaaatgattaccatcaaccttcatcggcttctttgaatcatcaaacttaatcttccccccttcaatggcaacctggatctgctgtttgaaaactttgcaatcattggtattgtgagaaccagaattatgccacttgcaataccttctcttgcctagttcctcagtcgatggaatcacatgaccagcaggaagttgaatttgtttttcctgaagcaacaaatcgaaaatcttattagccttggtgatatcaaaatcaaatctttcctctttcccagaacttctcacctatggacatggcacaaccttcttgctcctgacctactcggctgttgctacttcggaatcatcctcttcatcggaaccatacatgtaagggtatacgtggttgatctttttgaaatttttcttagcctctgcaaacctttgttcatgtagggttaccttttgtgcaagatgagataagctttcaaactcctgagatgaaaacttctccttgatcgaagttatcagaccctgaaaacccaaatcagctagctgagaatcggtcaaagccaaactgtagcacctattcctcatctctctgaatctctgaatttaatcctgcatagattcatcatgcctttgtctgattgctgttaagtcagataatttcatctcatggattccactgtaaaaataactgtgaaactgtttctccaaatcggcccaactattgacagagttgtatggcaaagaagaaaaccaagtaaatgccgatccggataaggacaaaggaaacaatctaacccttaaagcatcaacagccgatgcttcaccacattgagccaagaatcggctgacatgttcataagttgagacattgtcctatcctgagaattttgaaaaatctggaactttgtatcggttaggtaatggaaccctctcaaaccactcaaggtacggataccgatacaagtttccagtatcctttggcttaagcccaaactgctccctcatcacatctgcaatcatatcggcccattgtctctactgaggcaccccttgcgcttgttgctgtatcggctcaaactggttgaactgaggagcatactgaggctgaggcaatcccccctgttgatagtgaacatgaggcgaaggaggctggtattgataattcaagttacccccttggtagttctggacattcggctgaatattacacactaagtgctcagggataacttgggtagcaaccgattgatccggttgtacaacgtgtaccagatgctcagggacaacttgagtcacattctgatgcgacggctgattatcaggcgtcctcaacccagtcagcatctactggatcgtttgttgctgaatcagctaagttgtctgctgttgaatcggttgacctatctgctaccttggcggcgtctgctgaatggatccaccaatcggctgagttggcaaaaacattgaagcaatttgctcttgggacagccgattgatattctgaccaggatgttgcggttgttctttagacaagaggcgaggattattaattatttgccttggtgccgatgatggtgcagcttgtgctggagtcgaagctgatgccatcggctggattgatggtgcattggtagcagactgctggttaccagttaccaagtttctgtaatttgggaaaacgcctcctggaagataaactggccctgtagcttgatgctcagctattgtaccattaaccacagactttaccatgtttgttaaggtattgactaggactcctgattggttgatcaaagcatgttgcactgcgtagtcaatccgatcttggaagttgttaaactgtggttgcacttcattgttatcttcatcaagatcctcaaccacttcatcctgaaggccgtcacctttattgcctgagccatctgcaatgcctttatcaccttgggatgagcttgagccaactttgtcggcaacaactactttcactttgtacttttggtagactttcccgcgagtttctacgaacgacttcatgaattgctcctgagcgctcttcatcattaattcaaaatccttcttttgttctggtgacaacttgtctatagtgactggaacaatgttcccttcattaacgtcggacccagtcggttttggaatcttggtttgagggtctgacgacttgcctgtcgatggcagaggtggcttttctgctgacatgtttgtcgtgtcccaccaggtgtgccaaaagcgtgttgatgcgaaaaacacgaggcctggaagatctgcttaactttagtgcagttccaaaaatcttacctttaggttcgtgagcgtgccagttgattttatcctgcaatcagcaaggaacaaagacaggaaaaatagcggttaaatctataaacgatagccgatcggtcagtcgccgatgacgtatcatttatctttgagccgatgtcatatttaagtcgatcgacagtcataaataggtaaaaaaagaactaaatctattcgatcggctgaagttattaatgatatataatacttccgtcgatatatacttaaatcaagtgattgggatagatcggtcgccatgccgagacagtataaatcacttaaatcgaaatatatattaacgaggaaattataagcattcatagcatagccgatcaaatagatccagcatgtatcggctaatactccgatactactctatattaagatattaaagcaggcaaaatatatcaaacatgaagcttaatatacctatatgcgacaagatcttagcataaagggcggacttaacatgtcaatcaggcatataagatataaaatagttaaatcaggtaagatcggctggaactctaatgctaccctaatcggcaactcaaaagcaggccagagattaagattctaatcacgacttataaggtcaaactcaactgatgcagctataagtaggaaaagaaggacaatatctagacaatcaaggctttgaatgtttcatagggtggtggatatcctatataatctaagtcaacattgatattaaacctaatcggctgccttccaatgatggatgttggccgattgaaagttaaataacaatattgtcaaagtattataagatatatgataactcgatgaattacataaacaagattagagtatcataaagatgaaagcactaatcccgagaacgcaagccgccataacaagttttacctctagttgaagatcgaaaccgatgcaactcaacccgaaagtaagaactcgtcgaaagtaaacgaaagtaaaagggtggcgatgcgccgagattgtattgaacgtgtgttgtttgattacatgggttcgggtcatatttatacccgagatacaaaatatgtccttatcggacatgactcttatctctaaaaaaactctaaaataccataagtctttgcggcagacttttgcccaaacttatttctaaggaaattacataaaatatcctaactaatagatacaattgcctttttcaggacttaatccgtgcgtggcaatccatatgaagcacattaactcaacccgacaacgtgtaccgagtcacattgtcggaatcggctcaatcggctaaccttgtccgactcgaactctgccgattctggtcgcagctgattcggactttagccaattcttactctgtttccggaacgatctctatcttggattctgcttcagttttatctccatctccaatacttgaattaccaaatttggtcgctaacacccccgtcgacagagagtgtccaccatggccttcatcttgtggcaaatagtcggtgattgaaagatcgccttgatggaaggtgcggaattcagcttcaagcatgagggcgcgctgctcgctgttgcccaagaactggagttcgagagcatgctagacggaccgagtagtggtgacgtgggtcatcgccctcttggagaagatcggcagagatggaaccatagagccacccgaggacaacactatccacctggtgccaaacgatgtacccacctcagcttctaatcctggaagtccttcaaaatgactttgagtcttggatcatcactccatggaccgacctgttaagctcctttgataacctccaatgagcagtctcaattaccaactttgtaaatcctaactccgctgccccaatcctgctgcttgcttacacgcatggatttctatgcacgtcgcatccccaattccactgtaaacatgagcagcagccgccataaagtctcccttctcatttctcatcgccacacctgctgcccctctattttcattttctaaaaagctccttccgcattcagtttcacccgtccctcttctggtttttcccaatgctgtgtcggatgcgctacagtgcccatcttattttcatggacgtttgaccattcctctagttgtgccacaattctcatagctactcctgttggattctctggcatctgagcatggcgtccatctttttgaacagcccataagttatgtagagtcacaaagactgcatgtattacatggtctgcttgatccataagtctgtcaaacacccacaaggcaaacattttatagttgttgtattcctcatttggcaccaagaagttgacgcctagctttccttcccccttactccaaacccacctggagtaggggcattcccaaaacctatggacaacattttcttccctttgacagaacaaacatcttacccctgtcttgattttccttctctgcaactctaagccaagtgctagcccattttaaattaatcgctggccattcactttaattttatacggaataccagcactccataaacgctgccatcccctgcggggttatcccagtttccattccactctatcatttgaaacttagaagtggataagtgcctagctagtggtcaattatggcatagattagccatggatatttgcatatggccaattaattgcccgtcattttttgaaagtaagcatttgttggggcaatcaccagggcatggatgattgatatacgacccagtgaagtatttcattgcgatgacactgaaaatatttttgagaaaaaaacccaataaaaattgttttagatctggacgattggtatttattttgttggattatttatttctggaaaaaaattgggttgcactccatttggatttttagaaatattagcatttaattagtgtcgttgtgtatgagttgcggaacacaatacatcaaaaagtacatcttcacgcactacacacaattcacccatatcaatataaaaataatatatattgcagaaagctactaataaagattaaataaaaaaagtgagagataaagcatgagcatatatacgatatatacaataacatggttgatttttttttaaaaaaacatctatttagatatacatgtataaataaatactcgttcatgtaggtgtatggctgcatgagtcatgacaaaattttcacgttacaataaaaatgtagttacagaaaacattatgctgtgtcaaaaaaattatgtcttttctattaataggaaaatcaaaccgttctatacaggaaggacacatctaataagggtttggtggtctaattatctaatattggaagaaaaccgtacatgtcataattgtagaacagaaacatcgatcgccagctccagatgtcctgcctatggtactctccttgtttggcagcggggaatgcgcgccattgatgagtctatttttctgtctgcccctccatttctgcccccacccccacacccacctgaccacctcctccccttcccacatccaggctcctcctcttggtggtacgtgcatgctcttctcttccaccactacatgattttctttccaattccttgtttgatcctggttcttcctatggacattagtaataattgtgttgctccggcattgtatgttctttatttaatgataaaatgtaagcatcagttatacatcttttcccatgtggactgaggataaagaggctctactttgttttctacctggttcaatacttgttgtgctccaatttcataagattgggaaaatctacatcggaggcagttgcttatttgtattttggattctttgggtggtcggccagggattgtcaaggggatctaggatttggtacattcttggttcattgtggttttttgggcctttataatttcttcatttgatttttgatggttctgattgtgttgcatgtcatgacttataatgggtgcaagaattattcaaattattccagatcataacacctatcttccacttagattacttttctgctatttttttagcgaaatttattctgttttgtgttattcaagcgttcttgtgaattttgggcttggctgtaaattaatgtgttgaatttgtgtcttcaagcacaatctcaggcacctgtaggtttttatcatctggtgtttcaacgttatcattaatttatatgtgtattttataaattttttgttaatccagaaaaggaacacatgttactaaacttataattatactgatggactatgatatataccatgagatgaggctaattagtgtctcacaggcccactgctcaagcattaaaaaattcccagcaaactgagaccttttgtcttattttacactgcatcgtactgccaagcaatactttaggtcatcaagatatttagaaaattattcgttttctcctttattatacattgagacatagcatgtgatataatcaaataataatgtgtataactgttcaggtccagatagagccgaacagtcatgacagaagtcctatcaagacctcttgaacaccgtctaagctctcgtaagtaaagcaaataattgtcacaaccattttcttattgtttaaagtggattattacaccctaataatgtgtatttttttattaaaaaatcattatattatcttctatctcaaagtataaacattattttcagataaagcgtatgcccttttcccaatggtattctcccgcttcactatcaaagaattaatttctaacttaactatttagaaaatatttagaatctggtatattggaatatacatgaccaactgacatacacgatgtgtcagcaaccttagatggtcactatgaagagaagaggaaatccaatgttgaatactcagaggatgagaagaaagccaaaatcatatcgctgaagaagaaggcaatgagtgcttcacaaaagttaaggcattcaatgaagaaggggaggaggagtagcaaggtcatatccatctcaattgcggatgaacgtgatcctgaggaggtgcaggctgtagatgccttccgtcagctccttgtacttgaagagttgctaccatctcaccatgatgactaccacatgatgctaaggtgtataatctgaaaatagcacatcatgttgttatttatagtttcttatgtgaaaaaagtattactaaaatttgagattacataggtttttgaaggcaagaaagtttgatgtggagaaggcaaagcaaatgtgggttgatatgctgcagtggagaaaggaattcgctgcagataccattcttgaggtaattgcttaagattaaaatatatttggactaatccttctatggttgacacatacccttgtttataagcagttgacacatttttcttcaaatcctatctcaggattttgaatttgaagaagctgacaaggtggcagaatgctatcctcaaggttaccatggggttgataaggaaggaaggcctgtctacattgaacgtcttgggcagatcaatgtcaataggctaatgcaggttaccacaatggatcgttttatcaagaaccatgtcagggagtttgagaagaactttgctgttaagttcccagcttgctcaattgctgccaagtgccacattgatcaaagcacaacaattcttgatgtgcaaggggtggtatgtatgtgcaaatatttggataattcattaaatgattgcacttttactatttataatctaagaaaaaaaatacatttttaggggatgaaacaattcagcaaagctgcaagagacctcattggtcagcttcaaaagattgatggtgataactaccctgaggtaatgccttggatgcacaatatattggttgtaattctgcagaaaattttgtgctggatttattaaagttctcgccgcatgtaattgtttttgcagacattgtgtcgaatgttcatcattaatgctgggccaggattccgacttctttggagcacagtgaagagtttccttgacccaaagaccacagcaaagattcatgttagtgttcttccaatactttgtctatgagtgctcaacttgaagattgattatcaataatctgtgcatttctttaggtgttgggcaacaagtaccagagcaagcttcttgaggtgatcgatgctaggtagaacacctgatgctctaagttaaccatcatattcgaagacaatgttcaccattttaattctattaatttatgttgtctagtgagctgccggagttttttggtggaacttgccaatgtgaaggtggttgcatgaaggctgacaagggcccctggaaggatgctgaaatattgaaggtgactgttccaatctgaacctttattatccttgaacaaattcttaaattacaattcataagggacaaggaactcaaaatttctatgctatattatgtttagatggttcaaagcggggctgggtggtgtggaaatcttagtttgaatcatctggatgctgaggagaaaatgatgatttgtgaagatgacaccatgcacaccaaggtagcaaagatgttacacgctctttgcactagcacattcatatttaagtatttctaaatgtattggatcatagtacttagacatctgttattttatttacgtaaaataaagaggcaggagtctttcaaatatgaagggtgcactttgtcacgaaaaatatcctgtgcccgaattgaacatccttcattatcgcctgtttgcgaggaacttcctcctacgatacttcctgtgagttatgctttatcactggtgaatttccactattcttccagaaaatgaaattccactattgtccttctaacaatgacatgtttgtactttaacaaatttaaagtgtgttttttttgcgcaaacaaacttgcagttagtgttgaaccatacaactaaaagaatatttctcacgtcttatggatgaaactagaggttcaatctccctagacaaactagaataaaaaaaatttgagtcttaacttacaagcttaagtgggctcgtcagttgataatgcgatagatatgcacagacaagtaactttgtgatgatctttcagttctaggaaaagtgtaaaacctcaaatacttcccaagcttagtcatcatataaattttcattcttgtggtgtagtggttcatatatttcttttctaaatactttctaagcttagtcctcatataaaaggagtttttttaatgcagaccctaggatcagcttattcttgtgatgttccaatggtagagaaggccatagatgccatttgccagagcaagggattgccagatgagaatgtcacagtaaccaaaggttaaacatctttgcggcctaataatcttgtgacttaatattgttactctctagttagtttttaactaacagattggataatctttttcttgcagcgattgtaaatgcctctaatggatccaatcctccactctatgggggtatcatggctcttgtcatgagcattgcaacaatgctccgtgttagccgcaacatgccaaagaaggtacttggtgctacccttggggcacaaagtacatccaaaatccaagcacaacaactatccgagatatcagtggaggctgtgtcagtagctgaatatgtttcttctacaaagcgtttgtccgatattgaggagaaggtcattgcgattctcaccaagcctgcagaaatgccagctgataaagaggagatgctaaagactgccgtcagccgtgttagtgcattggaggaggaacttgcagcgaccaagaaggtttgtctgttttcaccttaatgatgataagcacattcttattacattaatcccatagatctgtattattaaatgtattgagactaacaaattacatgttgttctactactcttactaaaccatttctaaaacacgcatattatatgtttttttcaggccttgcaggagactcttgagcggcaagaggagatcatggcatacattgagaagaaaaagaagaagaaaagcaaggtaaaaaagggaaattaaaaggcatccttttgctgctgtgttgtgaccctcaactacaagaagtaaagttttgcacttgtcgctgaccggtgtaccaaaatatatgagattctcaccaaataattagtgttgcttgttctctttatgaactcatctactatatacttatgctaaaaaaatgtttttccttcctaatcattgatttcataaatttaactttgccatttgaaatttcacttgcagcgcttgtttcgttggtaatatgcgaagaacaaataccatgggtttgatcaagaggtgatgttttcatcgttggcaaaagacgattccatgtgtaacatataatgttcatttattatttttcctgtgttgctacaattgatcgatctgagcttctctgccttaatataaatttttgcacattgtgggtgcggtattgatgctttttgatgttgtcatcttatggatcaaccatatgagtgttaagaaacttaatcgatttaaactcaaattgctacatcaaccattaatttgaagaagacaaacgctgagatgagtagattattggattgttttacaaacattaaagataggtaatttttgcttgttcttattctcttagtttatcctttctggtgatcaagtaaaacataacatgtttacataacgtgcaacttttcaccggagtaaaacattgtaagatccacccacaaaaactaaataggtggcagacacattgtcacgtcgggaaaaatgctaccattttcccaaacgctcattgtattaatgtaacgccccgatttttgttcgggattaaaaatcattcaataattcattttctagaaattaaataaaagttaaatcaatttaatcaagtaaattatagagggaattaaaattttcctttaaaaatcattggccggaaatattttgtaatattctctgtgccctaatgaacactctgaaattttccgcgaattttcggagctcaatatctaattttaaagtcacaaagatcatttaaccaattaaataaaaagaaaaacaaattaactttccctttctttgtaattgggccgccccggcccaattccccttcccctcccacggcccgcgccctctctttccctctctccggccagcttctctctccctcggccgcccttgcaaaagtccatctttcctccccgttccaactctccctccctctctccccgacaggtgggacccgtggaccccacctgtcacctcctacctctggcctccccatccaaatcaccatggccggccgaaccaccccgcccacgtcgccgcaaaatccgccactcccgcctcccgcgctcgcaactgtcggcgcgggcacgaccccctccacgtcctccaccacttccccctcacgccccgcgaaaatcggcgacgagccacctccaccccaccccacgatgccgcctccactccgacgccggttgccgcccatcccggcccgagccactccctcccgggcctatataaatcatcccccggccatactctcccatttcacctcctccccgagctccccgcgcctttccccgctctccccatgtgcgccccagctccgtcgctcgtcggcggtctccagccgcgcgccaccgccgctcctgccgccgccgtgctgcgtcgcctccactgctggcttcgccaccgcgcaggcaaactcggcctccactccatttccccattccatcgtcggaactccatctccaccataaaaccgagccactgccccttcaaccgcctccagctgcccgccaccgccactctagccactgccgcaccgcgccgatgccaccttcgggttcgccacgtcgtgccacgccccggccgccactccacccgtccattccatcgcctgaggactgtttccaccgtcgacccgagctccaccaccgcctgtgtcgcctcgagccaccgctcctcgccgcgtcagccatcgccacgcaaatccgccgccaccctcggcttcgccgcgctgccccgcacactagccgccactccagatccccaaaccatcaccggagccccggttccgctgccaacccgagccaccaccacctctatcgcctctggcggcctttccttgctgtcttcggtcgccgcgcgcggcctaacccctctctctctccttcctcgggccacgacgctccccggccgccccctcacttgccgggccggcgccgccatcgccgtggtcgtcgtcgtccttccctgtgccggtcatcgtcatctcggtgagcatctccctcctcctccccttcctttcttttcctctctttgccgcaccggccgccgcttgtgcgtcgccaccgtgcctcggcaccgctcgccaccgcagcccgcgtgcgccgccgcttcccgcgccggtggccgcgctgccgcatgccatcgctcggccggccggcctaagccgcgcccgtgccccagcgcgccgcaccgtggccgcccgatcggcttgggccgatctggtgtaacagccctacattcataaccaggtatttagaagtgcatttgttgtcctttagatttcatatttactatattgcaatttgatcataggcgataacaaaattaactctaatcggtaaaattgaaaccacttctatttgaataataacttgaacataagtgtacatgtgtaataatttattcaaatactagtttatttatcaccaacaaatataaattttgtggattttttactctctgtttaggcctcctaaaaattcaaaccaactttcagcctaaccaatttcatcttttcaccagaattaaaatatttcgaatttttgagtgaaactttgaaaaatggaaccaagaaaacaacacctatcaccacaccaaatcccttaatttttgaactagttttacctagtcaaattgaatttaccaagagagggaaagaaaataaatcctggaaattgcataaacgaatctgtactcagtttttcacccacctctctcaccctcatagacagccatgacttgggcccacttgtcactaaccttgggtgcctctttagccccacaacacacccatgggcgtgctcccacctcaggacttaaggggggcagagaaaaccccttcttcttcctcccctttcatcttcactgcttgttctttcttttcttcctcaagctgagctctcatctcacttctcctccccaaatcccatccaatagcccaagatcaatccctgcaagttagaccacaacaatccccatcatccaagctttccatccatcccaacatcttgcacatgcatggagagttgagagagatcgaaataggagaagagagtggtggtttcagcctgcatggttgcagcagcaacatgactttgtttcccaccatttggtgagcttccatgccatccatggtgcctttttttagttcccttcatgttgaacatctacagcaacattcaacaggtcatccatctacattattgcagctaggaggtggctgtagctcatccggtgttaatctcttttgatttcggttgaaacagccctaggcaacgtctcttaccgtcagcccgaggccttgctccatctcttgccatcagcccgaggccttagcctcgcacgaccctacgaccaggttgctgccatgtgagcgaagtccggtggaagttggagaaaagggggagtgaaaatagaaatcgatttttgagatagcttttgagctgaaagaggtttgcgctttaaaaattcataactaattcatatgaactgcaaattcagtgaaccaaatttttgtcgattaagaaaaacatgatcttcagtgttgaaaaataagaatgaccaacttttgtactggttttcccagtaaaaatataaatagctatatgtatcccttgtgtggtctagctcttaagaaattcgtaagaaattattggtaaaagttaaaattgtgaaaccaattttgttgagcttatattttagtactctttgctgttgtggtgttgtttttggagaaactacctcttaaatcatgtttaggagtttatttagcattcctatgtttctaacttttaaaatccataaataaataatgacaacacttatagctgtgaaataatttttcttaggagctgtgagtgatgtacattactctaaaaataatcattattatgaaatcttggtttgaaatgcattttacttgtaatgtacaaaaggaaatgttaatatttgcagaactgccattttcagcacctgagagcttgtcattttcatatctcccaaactataagtgataatctggtgattatttcaactaaattcaagttaaaatatgatctacccactgtatttatttcataatttattgatcattttgcatgtgcatgtttatttggctcttattcgcatattgcttcttttcgatagattcggagattccggggagtaacgagccatatcccgaggaggatagtgactaccctcagcagcaaggcaagcacctaagcatatagaatctatgctttctctaaaaatgatttggttgcaatctatacgtatatatatgcatgcattgcctagatattaatattgtcggtttatggtgtatgggtagaacctatttatgcatttagttcttgtgatattgctgtccttataccctattaccactggttggaattacttgggatgtcttattcattaatgcttagccatgcttagtgctaatagaactatagggatggacaatgctattaattgtggtatatagacaacttgcatttttaggcataaaacttgagcacttacactaaataatggttgatgaaatatgttggacttggacgggtgatagggcgatgatgggaggttggtttcccctgatgcaagttgccccgtctaggtcgttaaggatcgaacattttgacatctaatcaagcatcctacgtattttccacatgccttatttgggatcggcttgttcttactagttctactgtgataatttataccacgttggagagtcgtgaggcaggtagcctttggagggcctcaggtgcctaggtttggccgggggtgtctcccgcgtggcgcgcccgccttggtgacatcacgcacgcacgtgactgagtcgtcgggaaccccagcatggtataggtggttgggtggggctaagaaagggcatgtaatgagcttgaatcaattgtgtaccgcactcgacggggtgtgtagcatttgatctttgttcatttcgtgtgggtccagttgtacacctctgatcagagtataatctattcgaatagacgcgtcctcggttatggacaatgcttgatgtgttagtcagttatgattagcatcaaatgtggattattatagatgggattatgtttgatggtggtgttggcatgttgtgccatgttggtatggactttggtagtccatggttgatgatgagagcgccgtttgggctcatttgcttatacatttcagaattatatacttgctgtccataaattaatatgatgctagatttacttgtccttgcttattttactcattaattgctcaataaaattagctttatacaaatgttcaacctagagacccactataggctaaaaaagcttgcatacttctctcttccttatgtatatataattttgggtaagacttgcgagtacaatcttgtacttaacccggtgtctgcaatttcaggagaggattccgattatgagttatgcttcttatgtggtcattgctctgccgagggcggcgagggcaatgagtgatctcttgcagcttggctcttgcccggttggtttgccctactggggttgtggcaccaccggttttatcttttgcttatgaactctatttgagacttccgctgctatatttatgtgttgtatgttgggacctcggaccctattatgtgtcatgtacctcgttgcactttaaccctattatggtacttgctatgtttattaattgcttgagatgaaagtgtgaggctagtcgcatacctggggactagctaagcatgagtaatgggttttgatcgcttgagataatcggggatagtgctttggatcgagtcactggggtatgcttttggtcgccaccttcgagtggttgacgggcatatgacggagtggactggcaagctatcttacggttatgtcttgcgctcactactcgacattccggttattataacagaaggttgtcaaccgcgatcatggacacattgaggacgagtggctatttatgagtgtatggaacccacttctccaatagtatgtggtggtcgcgttggacactggatggtataatactcggggtgtccacaacggttggtatcatagcaatgccgactgtaggctagagctaagttggcaatttgaaaatgatttgcaaaatatttaacttgagtcgattgtgaaaatcttagtatgtgtgaatcatttttactcctcatctcattctagtgttctttctcaccttattctcagattttccactcatcttggtctaatttggttgacaaaataaatttattacttctcccattcaaatattagaccgataatgcacccggtaagttgagggaattaaactttattctcagtttgtaagtacaattaaaatgtgcaatagtcactctaaaatggtgccttgctgttcctcatgttgctcttagtctccccaaaatttttgacaaattatgaacatgttttaaacctccaaaatgtcaaatagccaaatctggaatttctggaacagtctgtaatcaaataatcactattttgctgtcaaaatttttctggagctaggcaactactccaggaacaaccacaaaaatgttcagaattttatcacttctttagccctctctaaaaattcgtaaagtggctgctgttcggcaacctgagaaatttcagaaccttgtttcggaagaagtaaaatataccaacttaaaaattcgaccaaatatattgcaaaagtgtactcccagctgagagacgctagatagaaatgtgtcatatagcagtagtggccaagttgcagtgttggtctatttgaattttcatgttccgacgattgatacgcttttggcccgctatgttgatcgcaattggaaaactattttggtttattgcttcttgttcgagctttagtataggatgagctcgattgattcttaatgcttcttatttggttgcatcatatcatgctaacataacttatcgcatttgtatataaatgaattgttcatttttattgtgcattgaaactaattatgcaaagatagacttagcttcgcatgcatttgtattgtgcattcatattaagtcggtaacctaaacttagtttatcatgtatgatgcgtgctaactttcaggccattatcaatccttagttgctcccatcactaattatgtttaatctcatatccataggatgactcatcccagcactcgctctcaatcccatgatgctccggagggttcccgaagccgtggtgatgaaccgccaccttgtcctaccatggctgaggttcttatggtcgtggagtgcaaccgtgtggctcgaaacaccgtccttcagcaaatcacagcaagtgcagccgctaccgctgcccacattgcccaaggtgcaggcggtggtggacaccatgccgccgggggactcgctgaatttcatcatactcaacctccggtgttcactcgctccaatgatccacttgattgtcgcgcccggaaaaataccttttccagaacgctagtgtattaatccccgtcccaggaaaagctggggtacaccacacaaacatgatataaaagacacatctttattatatcgataatatttacattattacaaaggcacttcaggcctatggctccatcttcacaggcgctcaactggggtataagccatggctccacctaaacttcttctccaaagctttactgaagggggtgaaagatagagcaagaatgagtacaaccacagtactcagcaagtcacaccgggagatgcatgattaatgcaagggagtacaaagggtgataatataggggttaagttttacaataaacagcatttaagagtcacttagttgcccaaagctattttataaagatgatcctagagctacacagtattattaatcaaggccgtgagcccacacgaacctgccttaacccaaggccaacgataattcagaccgaactggcaacccgacttgggtcctagctcatcccaagccaacccaggccaaccattccacattttagttgttaagcaagttttaagaattaaaccactaacttgggtacattactaggcttgcccataaccgagggcgcggctattcgaatagattatgctctgattagaggtgtacatctttacccacaagacacatctttactctgcattcgacggccgtggaacccgtcataaaggatgtgacataacccctttacccatcctagccatgacaaaagcaccgacccaacctcgcctacagccagaatcccgagacaggtaggtacgattgagcccctagcagcaggacaccggccctgtgtcataacatctcgactaccgagccgcagcccgtgtagccttcatttgccctagagatgtccatcgagccccgacttcgtccatctccatccatgtactctttccaggactagactgagcaccgagttaagccttacccattagacatgtggttagtacggtagtgctttgcaacataggcccgaagaccggtccttatagtggccgaggtgctactagaaaaaccatgtacctcgagcccagcctaaaaccattttgggagttttgaatagaggggggaggtgtgtgttcaattccatcacaagccaaccattccacagtgtccaaatgatatgagaactcccaaagtctaaagttataaaaccacctagtgttgcctaattaatcagcgaagcatctacctaaattcatactagtggaaccgttaatagagtacccactagttggggttttgtttatcctagggtgaacaaggtaataataacaatagcaataataatgtcataacaaaggtaaataggcatggctaaataaaacagtgataacgcgggaatttaagtaaagcggtaatgcaataatttaaatcaaaataattttataaactgggattcaatatgctcaagggtgatgcgacttgccttgcttacagagaacggccttccgaaccttcgacgacgaccgtgaaccacgcttcgggaacctccggaacgacagaagctacgtgaagcacacaagcaaaactacaagcctatgaagaagcaataacaatacataaaaagaaagcacgtggttctttaggttataacaaacattacgagacttgaacaggtcgattcagagctcgtatgaccaatatttggtcatcaagtttaatgttgtcacgtggagatttacggattattgtaattaggctttgcaactataaaacatgtgtaagcactagcctggaaaagacaggaaggctgcgccgttgacatgcggaccccacatgtcaacctaagggaccacggtggaccgggtacacagagacggtccacgggtcgacggaagcggaccccgtgtgtcaaccgaggcgagtggccggcaaacggactctaccagacaccacgcggctgcacacgtggaaaccacgcggctaccgagcaggcacacaaacacggtcaccacacgcacccacgaatgactacagacaccggtacacgggtaccggggtcgacaaccgcacaacgggcacggggcgacaccgaaaggacgaggatggggcagcgagaggaggcacccttaccaccacgcgaaaaggcgcggcacgacgacgacgaatgggcacggcggagacggctcggggacgatggaggcgaacgacttcggcggcgatccttggacgaaggcgagacgcggccagcacgaggcttgacgacgtggagccgaggacgaagacgacgacggggctgcagcagctcgcttgacgaaccactggcggcaaacgcaattggcttgacggagggacgaatgccacgacgaccgggaacgacgggaggacgacgaccggaaccggcgaggaggcgatgagggcagccggcagcagctacacggatgcgaggacggcgcggaacacgccgctgtgatgacgatgatggtggcggcgcagcaagacgatgagctgggtgaccgacgggacgtcgacgacgaggatgaacggagacgacgacgatggaccgcggaggggtttggatggaggggaggcgatgccaaggaagatgtcgccggctcgccgctgtgattccggaggtggtggtggcgcggccgacggtgcacgtgtggaggaagggccgaccggggaaattccggcgaggcggatggagaggccggcgtggcacggcggtgttccggcgaaattcgggcgacgtcgtggcctagccgaggaagaggacggagttccggtgccgggagaggtggtggcgacaacggccgacgcacaggagacgcggcagaggcggaacagtggcagcaacgccactgttgccggcgaggatgcacttccggaggtctccgcgggaaacggagagcatgccggggaaggggaggcgactgcgacgccgggggaggcgatggcacggccggccggctagctgacgcggcggcaggggcggttggagtcggccggtgctagggagtgagaaggaggcggcgtggaggtggctaaagactcggaagggaccaaaatgtaacgaggggaggatgaggacttcgttttatagggcaaggagggagtgccagtcacgggagaggtcaaagaagggggattaaatcccggcgattggggatgggattaaatggggaaagttaggggaactagagaggaagggatgtggattccatttctctaaccaatttgaattaatccggcatgaatggagcggattcgggggaggaattggtgcaagggttaatgggagagaggagagagaggagccggctgggaggtagaagacgaccgggtgggtggacccattggtccggcgcgaggcgcgcacgtgcgccgcacgtgcagaggggcgcgagggagaggagggaggtggcctggggcggcaggtcggctgggccgggatagggtaggggcggcccaagcggaagaggagggaagaggtgggccgggaggaggaggggaggcctgggatagatagtgtggagattatgggtaccccatacccacacggcatggttatccgactagttataggggataacttatatatatggaacatgtaacagatcatgacttgggtgttacgtttccttgtatattacggaacggcccaaagtcctggtttgataatattgtaaagtagatttaggaaaccgataccgtattggttaaggtttctatcttgtaatcctgccccttatcctatataaggtgggcaggaggccctctagggggcatatgagacaactagatcatcagatcgatactacactcggcagattcaaatccccaaacaggagtagggtattacctctcattgggagggcctgaacctatctaaatccttgtctctgcatccatccacttttaggtctcgtgcgctacccccttttattattgccgaattcatgtttcgacagttggcgcgccaggtaggggtgcgtcgagtttcctatcgagaaatgcgatggaatcaactccatgagtcgccggcttcgtcttcgctacgggattgtcacttcctcgtcgccgacaacttcgacaagctctcattctctgacttggattcaaaccagtcaggagagattcaatctaactaagaaggagatgccacttttaggagttatctccccgacgaggcctcatcagttccgctcgaccggagaacaccgccgccgccgacacgcgaagagggagatcgtgtgctgcatgtgcctgcagcggtgtcagcggtggcctcacatcgcgctcgcgatagtgctcatggtgacctcgcgctggtgttgcgaggcagcaagaccgatctctccctgatggcgtcctcggatactccaatctattatcattagattaatttctaatcagattaatttgctctgttgtgctttctctgtttttgcatgtactgacgacgagacgggcggcatccatctgaggtcatctctgccacgtattaatccatgcatgtgttgctggattaatgccggccaaatctccagtcaatcatgctattggcaaacgaaccaacatgcatactgcatatatgcaccgacacgtgcattatacctacagagcattaatctctaatttctaattagatttatttataatcgcaacttaactgaagcttgtgttggctattttgttcgcatgtttggagattccacacgccggggggctgcggaccagtgccgcctttgcgtgcctaacgcggcccgactgctcctagggcaagcacgacctggatgtgacgccgcacgtcgggcgcttcggtcttcacccggccaacacagcccgactacgctgcttccgccgcgggctcgggagtttcgcctttgtgcgccgccgcctcatccgctgccaactgatgtttccgcctgcacggttggcctattatgccatcgtccatgggcgtccacatcttcaccgaccggctggcatttgtcaccgccgactggtgttctcacctacacggttggttggtcacaccactgttcatgggcgtccacgtcttcaccgaccggcttgccttcaccgccgtcgactggtgtctccgcctacacggctggcctattatgccgccgttgttgggcgtctacgacttcaccgctggcctgcctccttcgccgccgactggtgtcctcgcctatacggttggttggtcacaccaccgttcataggcgtccacgtcttcaccgaccggcttgcctttgccgccgccgactggtgtctctgccaacacggctggcctattatgccgctgttggtggggatcttcgctttcaccgtcaaccgccttcgttgccgcctactggtgtcttcattgttattgatggacgactttgttcccacgctggtcacctctgccatcatcaagcggaatattacgaagctatgtcatcattaattttctttatatgatatttttcttttcctctgcctcactacgtcaactggttcgccgttgactagtgagtcgggggctacagatgttatatcatattttttaaacaattttcataatatttatcttgattgcttgcgacatattctgagtacaaaagtgcctatcgagttatggagttccatcttcctatgcttttcgtttggtttgccaatagatagttgcctttgggccgattcctagcacccgggggcttggtggatggaccgaataacgcaaggtgctaagtattattcggaataaatcaaaagcatagagataagataatttattttctgctcttaataattgcaaaagtacccgagtagtaaactccgatccgtgaaactttgttccattaatgacgaactcatgtcactcatatgcatgtttgggaagtgcttaggccgactcccggtgcttggtggctatgactagtcgggcagagtgtttaaacgtaatgagtcatctgctcggggaaatcaaaattgacaagagaagaaatacatatttataaatattttaaaatacttgaatttttcttgagtattatatttatatcagatactactcatcctatatgtttgttctacaggatccagatatagatatgcataaaagggattcatggctttaagcttatctcttacgatccaggaatggatcagtcagaacatcaccacaggcttgctttcgccgccgccgactggtgtcaccgcctgcacggctggcctattatgccgctgttgttcggtgtcaacgtcttcaccgaccggtcgtctcgtccaccgccgactggtgtcaccgcctcaacggctggcttattatgccgccgttgttgggcgtctacgtcttcaccgaccggccgcctcatccgccgccgactggtgtctccgcctaaacggctggaatattatgccgccgttgttgggcgtctacgtcttcaccgaccggccgcctcgtccgccgccgacttgtgtttccacctgcacagctggcatattatgccgccgttgttgggcgtctacgtcttcaccgaccggccgcctcgtccgccgccgactggtgtttccgtctacacggttggcctattatgctgctgttgttgggcgtcaacgtcttcaccgaccgaccgcctcgtccaccgccgactggtgtcaccgcatgcacggctggcttattatgccgccgttgttgggcgtctacgtcttcaccgaccggccgcctcgtccgccgccgactggtgtctccgtctacacggctggcatattatgccgccgttgttgggcgtctacgtcttcactgactggccgcctcgtccgccgccgactggtgtttccgtctacacggttggcttattatgccgctgttgttgggcgtctacgtcttcaccgattggtctcctcgtccgccgccgactggtgtctccgcctatacggctggcatattatgccgccgttgttgggcgtttacgtcttcaccaaccggccgcctcgtccgccgccgactggtgtttccgcctgcacagctggcctattatgccgccgttgttgggtgtctacatcttcaccgaccagctgcctcgtccgccgccgactggtgtctccgcgtacacagctggcatattatgccgctgttgttgggcatctacgtcttcaccgaccggccgcctcgtccgccgccgattggtgtttccgcctacacggctagcatattatgccgctgttgttgggcgtctacgtcttcaccgaccggccgcctcgttcgccgccgactggtgtttccgcctgcacagctggcctattatgctgccgttgttgggcgtctacgtcttcaccgatcagccgccttgtccgcctccaactggtgtttccgtctacacggctggcttattatgccgccgttgttgaacgcgtacatcttcaccgaccggccgcctcatatgacgccaactggtgctatcgtcttcacggctggccacgttgccaccacgactaataggcgtcatcatcttcaacacaagctgtctacatctgctgccgactggtttcttcacttccatggctgcattattctgccacttttgattggccttatcgtcttcaccgccggtcgtctcgtctgctattgactggtgtccttgcctctacgtctggtttataccgctaccactattgatggacatcatcgtcttccgccgccgactggtgcttttatcttcacaattgcgcgtcttcgctaccggtttgcttctgttgctgctgactcgtgttcacttcatcatggctatgcaactttgtcaccatggtagagcggcttcatctttattatcttcggcaccggcaaactctattgcctctacttcgcaagctttgctacttcaccaaccacgacgtctttgtgaacctcaacatctcggcatgcgatgccgtgttattttactacaacaagtggctctccaatattcaggagagccattatcttcaatcaagcaatgactactcgacgacaagaagctataattctcgactctatgttcagttgtttcccaactaaccgaagagtcgggggctacacaaatacatggctcaaaattcgacaagctttatgtcaagatgaagcaatcaattaatcagtcaacaagtcaactctgggagtcatcaattttgtcttcgcttcaaagcagtaggtcaagattaaatttccatgtctgggagtttggagtcactgacatcatcactagcacctctgcttcatcgaccctgacatctccgttgttgctaatggatgattatgtctttaccaacttattatttcaccttcacggttgacctactatgcaaatgctgatgagcgtcttcgtcattatcattggttgcgacactgctattgactggatcgccgatatcgtcatcttcatcatgtcagttgcgtttgtcgtcgccgactcttttcttcatcttcaggattggtggatttcgtcatagcctttgatttgcctcgtctgtcaccgattgattatttcgctgccatgactacacaactttatcactgggcgctttcatcttcattgatggctgacctgactactgtcgactggtttcttcgtctccatggctatgcaacttcatcacttttgattgctaccatcaatggaccattgtgactacagaaggacaggctatatgatcaggggcttactagttcaaacacaagtatcataccttcaatttggacttgttccggatacatgcaacatgaattcatgatcatggatttattttctatgctcaaagactggactatttattattccccgtaagggttatcaaccaaatacttgcgccagtcgggattcaatctttatatctattttggagtatcccataagggataatcactcagatcagaagctattcatatgagctacacttggtatatattacccggaagatttattactcgggagcatgttacatgcgtcatcctttaaagggtgtcgaaggcatattttttggcctaggcctaatatgtctgcagtccatattttcaggtgtggcctgtcacgttctttttgcttaggccaaagtgcgcgtgatcaagtgctcaataccttaaaatccttttataccgcagttactcaactttttaggagttggtacaatgcattttaaaaggtgccaaacagtaatgctttatatagctgcccgctgacttttttatataagtcaaggcgctgtttggattcataaagcaattgattggatacaatatcattgctttttgccacgtaagtgtgcacttttattgaccaatattatggcttaggctcattatatattttggtcattttccaggcggttggtaaatcctttatgagtttatttactcggattttacaccacatatgccatatatttccaggtgtggtgaaaccatgtgtcttttagggacttaagcacatctgttaaagcagtgtgcgcatggcgtatgcccaatactttggaaatttctttattcacaacatacaagcttctttatagctgttttgctatgtgaattttcaatgatgtggccaaccttagattacactcatcatattttacaaagtagtcggtatatcactcggatcatgttattcagggattcacaccgcatatgctacatattaatatcaagtcgcttggttgaccataattattgaaaccacttggttggttggattatttattccttgactatatacttggtttgttcagttaaccacataatcgggggctacacctattaggtgcatctagtcgatgcacctgactttatttttcagccctccacagtcttcagatttggtaaaagtactcgggagatcatggcaaagatgattgaagcactcggctttggagtaatctagttcgagagaagattatcttttcgactgtgaaggtctcaggggctactgtggagattatgggtaccccatacccacacggcatggttatcctactagttataggggataacttatatatatggaacatgtaacagatcatgacttgggtgttacgtttccttgtatcttacggaatggcccaaagtcctggtttgataatattgtaaagtagatttaggaaaccgataccgtattgattaaggtttctatcttgtaatcctgcccctcatcctatataaggtgggcaggaggccctctagggggcatatgagacaactagatcgtcagatctatactacactcggcggattcaaatccccaaacaggagtagggtattacctctcattgggagggcctgaacctgtctaaatccttgtctccgcatccatccacttttaggtctcgtgcgctaccctcttttattattgccgaatttatgtttcgacagagaagaaaggaaaaagagagggacggaagagagacttcagccgcgggccgagggagagaggaaaactttgggccagacttggcccaaagggaaaaggaggattaatttttagtttttctttttaataaattttgataattgtttttgttgcttaataattattcccggtgttctgaaaattcaagttaaatttgagggctccttttagaccaaggagaatttaaaaaaaattctctaggccacattcgaatttttcttgtacgcattttaacgtttgccaaattctatttgaattttaattaattctattattccttttagaaaatgaattttatttcaggatgaatttatcacgggcgtgacaaatccaccccccttacaggaatctcgcccccgagattcgagaagactagcaagaagataggttgggcggtcttctcttctggtctgacttcttccgttgcgtcttctttaacaaacttgcccagcaaaacttccccactctgaactgcttggcttgatctcctgttgcagatggaatcttcttttcacctgacttatccttggttgcaccttgagctgacttcgactggggtgcggtacttgaagacggggtttcagttcgaggacttctcataattcatacccttggtgtcaatctcatacaagttaccaatttcacgttgtgcgtcgataccaacttgtcattactaggataccatgcttgtcatcatgagaataccatgcttggcgtttccttccagcttaccaccaaatgctttagactatcatatcccgcttaccaaggataccatgattgacaacttgccactaactgtctcatattagcttttctggtctctgggtgctagatacttctgctattcactgcaagggtcgatcactctaactttgaattatgcttcccaagagaaccaacttatcccacttgacatgctttgacgtcttcccaaatgactttactgctagacttgttattgtctgatcgttatcctgccaagtctgaagcttttttattggatgtgattttaatctgacctctgtagattatccttgaacatatcacttggttcataactgggaatggctctcatgaacaagaaactcggatccactttctttacattcggtttactttccactattctcttcatgttgtcatcatttagcattcaacgtattctttcacaccttcaaccttgatgtgttctttcccaatggatcgattgctaggaaattgtgttgaacgatactagtgcatgtgcttttattctaggtagcatctaatacagagccgaaggttgaaccgagctttagattccaactgttcaggttaacttcttgacttcttggtcatgtcacaaaggtttccatccttgtcctcatggaagtacttctacctgtggtcatcttgcttactcacgaattcatctgccttaatgacatggtgactgttgtagggtcgattgctattgggagtcttcctcgagtgacacaaatcatgtttctcattatcctttaccaatcacctttcgacctacttcttttcccagtaaccaaacatcttttccgatctcttccgttaatcaccttttgacctttctcaaccaagtactcttcactccggatgttgtgggtgcttctggggcaatgaggtccttgggcctactgcctttcagagaaaccttgaaatagttcgtcaaaagctatacggactatcgttgcctttgatccgaaaaaggacacatcagaaactcttagtccaaacaaatgtctctttggttgatcacttgattttcttcgccatcaattgctaggttatttgattcataacagattatgagcttacggaagtgagaccctaggtctccttaatcatcaacaaaatgtacacaactcacaacacttgcagtctcaatatggatccttcatacatttgccaaactcattcattatttcccgtttcttccttattacacggttggtagagaacaactataaaacaaaagtacttgaacatcgatacaagagtgttatggttgcttctgactagcactaggcttgacaggtactgcatttgctccagtgaacacttggcgattggcatgtctgcttcttgtaaattggcgaaaatgtggaggccgattttttttccttggttagggacagtccctggagtaatgtcgtggttctttgcagttgtaacaaaccataacttttttacactcgagttctccaccttgtacttgatttcttggctgttgttgaacgtgctgatgaagcctagagggggggttaataggctgtccctgaaaacttaaaaacaaatcgcagcgttaaaattcaaacagacccggaacatcgtggtaaggaactccggaacttccggcctgccaggcccagaacttccggtgttcttaggacaggaacttccgggttacaaaacaaggatgaaattcatatttcgaatcaggagactaagccaatcttcacaagatgatgcacaggtattctaagtagaagatagatcacagaaacatccaaaaaaacatcacagaaagagacaagagcaatttttttcctgaagttcgaatcttgcgatcctactctccgttgaggagctccaaagagctgggtctcgattaacctcttgcctcacttgtgcaaaaactccagaggaaatccacagccttcaaccacaaacacccctaggcaagtttctagaattgagtgatcaccaaaatccaactcaaactacttctagaaattcgccacaagtgtaggttgctctacttggaaatcctctagaatctcagcacaagaacttcattaacttacctcgttcccttttggaggagaggagatccttcataaacttacccgggacatccacaatatgcaacggattctcgtgggcgacacctaaccgtctaggagatcatctccaagagtaattagcaccgagatgacagcccacgagatattccaagtgctcacccaagatcctagtcttcacacatctccaaatcttcttctctccctctcaatctctctttctcacaagaattaggctctagattgagtggagaaggcaagaaacacttgggagaggctagcaacagctctaggttcaaaaagtgaaagtggaaggccaaggaacgagctggaaacgagctgtatatgtataacggctaggtgacgtcatctagccgttactcacaaatttgaactggaaactagacaggaagttccggacctggaagacaggaagttccggacttgcatttttggaccaatggagcatttgcaaaaatgactcctagggaaacttgacacttggttcacactaagagcacttgagatatctcagagcatcacctagaacccctcttaatagtacggttttttctaaaaactcgattgcaaaaaataaactatcctatgcacttctcgagttccggtccgctttgattttatacttttggggggtctccacgcatccatcttccacaccttggactaatgcacctgaaagatactcaatgaactcattagtcccttaaccacatttgtcattaatcaccaaaacccactagggggattaatgcactttcaatctccccctttttggtgattgatgacaacatggttaaagcttacaaaagattgataataattttgttttgaatggttagaggtgaatgaaactcccccttagtgtatgcatatggaaaatatgagtgaagctcatatgcatatatataacggagcaaccgaggagagtttccttcatccctactcattcgtgggatgcaaaaagcagtaagaataaatatgatatgcaaaagatacgacatggtgagcactcaaaaggataaaatcaacatcacatcacaaacaacaaataagacactcatagcataaatgaagagcaatataaataaagagcagctaagagcatctaactgtcattacatccacacaaatagagaattattacatgtccataagatcttaagagtagaggccaaaggattgccaggtccggaacttccggataagatacccggaacttccggacaagctgacatgacaataaagcgagggagctgccatgttcggaacttccggataagaggatccggaacttccggataaacagacagagcaggcagcaagcagcaaaaacaaaattttgacccccttcgattgcaattttctccccctttggcatcaaggcaccaaaaagagacaatatcacaagggaagaagaggatcaagcctcatcatcatcgccatcagaaggaatgatctcggtgtcgccggagtgaggagagtcgatgtcttgcccggcggcgtccactgcctcatctggatctgtaggaatattctcagtaggtgcatctgactcctcatcatcgctgctctcctcggagtgagaggactcctcattgaagaaacgagaagtgccagagggaccctcaccactagcaatgtctcaagcagtctcataagcagcaaaaggatcaacaaactcctcatcatcagaaatgtcagagtcatccttgcctgctgcaatccaatcttccttctgacgcctctctatcttgtttaccttcttagctatcttggcacacatacaaaagatagccctgagagccttctttatgggagaagaagactcagaacgctgtggtgcagcagaggaagaaggagcagctgaggtggaagcacgagtgactctggcagtagaagtagttgaagtagtgggagcatgaggacaaaaaggcttgtgttgattgtccttgaaataacaaatcccagtcttggcctcaatcatcttcatgatatatggagcatagatgcaacccctctttggctcacacactgtctcgtagatctcactccagataagcttcatgatgctgaaatctggcttgttgtagcgcatgcgactgaggaggagcgcatgcctacctgaaagagctgtagcatctcccactttggggagcaaagaccacctgaagatcgagtacaacactctatagtatggacgcaaccctcgagtagtccccaaacaatccttgggagcatccttctcatacataaaggtagtgttggtcggtgacagagcatcctctacaatgatatgtgggcgactcaggtcatcatcatctaaccccaaagctgcagcaaactgtgccatagagacactatactgctgcccctgaatggtccacttcacaaaatcaagccccttcttggtggtgccaaagaaagcagtggagtagaactgaccagtcacttcctcattccaggaatactgcaaggctaacaaatctgccacgtgcttgcgctcacacaccttgcgcacctcattgaaaactaagttgttctttgaggacatgtactgccagtctagccacttcatctctaccactggatgagatcttcccatgatcacagaattataccaatcaacctgcaccaaggtcctgaatctgtcatcctgagagttagcaggcaaagtatcaggactcatcattgtcctttccacacttgagcagatttttcagatagttcactcttgggcgtctaggatcaggatcaacaacccttgtcttgtaaagtctcaagggattgctttcagaaccaggctcatcctcattgccaccattatctgactctgatgcagctggagagggagagcggggagcatcacgaatgacaatgctaccatccctcctgaaatggatcggaatctgactcccactgtaaaaatctccaacgttttctttgcccaatctccccctaggaccatgaactggggggctcgagtcagcaggaacatcttgtgaaagcttctgtctcttctcacgaggcataatgaccactgcaacaagaatcaacaaggttggagtgcaatggttaaaagaaacagtagcagaatcaaggttactggctggctagacagagaccggaagttccgggccaagaacactggaacttccggcctacaaaactgaagaacagaggatttaaccaggccagtgcatgtgacaaaatcctatagatcggcaatctacaaggtagcaggaacaattctatccaaaaggttttctccctaggttcacatatttagagatcggggcaaaaacatgatgaaccaaaagagaagatcaaaagtgctacctagagaggagaaatcgcaaatcgatcgcgggatgaacctcctagccaccaatgtagttgattccacggagaggaatcaaatttccacggtttgaatagaaaatcgccgagaggagcactgtagcggcggctagggtttgggaatcagggaggagaagaagtgaggagagagagaacaggctcgggctcccccgggtatttatacccccgacccccggaagttctggactgggatgaccggaacttccggcctgacagaacagagggcagtcaggcccaagttcaaaggaatagatgagaattcaatgatttagaaataaaaacctatgaatatatagagacttatgatgcatatgaccagccaacaatcaacattacataagaatggtcaatatacatcacaagaagggataaaaaccaaattttctcaataaaaacacacacaaaaaattttgcaaaatttcacaaaagggtttttggataatagagggaatgtttgagctttattcctagtatcaagaccatcttctacacaagaagtgatctcaagacacaaaagctcttttttttttaatttacattttagtgacacatgtttggctatgaattagccaaccacccatcagctaatgttacgagagtctaagatattgagctcacccctaagctcgcaaaatcttttctcatctaaaggcttggtgaaaatgtcggctaattgggtcttggttctcacatggtaagacatatgtctcatttagtctcgtgatctctcaaaaagtggtggcgaatatctatgtgcttgtttcttgagcgttgggcgggattattggctattttgatggcactctcattgtcacataggagtgggatcttggtaaagttgtagccaaagtattttagggtttgtttcatccaaaggagttgggcacaacaagaatcggcggcgatatatttggcttcggcggtggataaagcaatggaattttgcttcttggagaaccaagaaacaagggaccgcccaagaaattgacaagtcccgattgtactttttctatgaaccttacacccggcataatccgaatcggaatagcccaaaagctcaaagtcacaacccttaggataccacaagccaagattaggagtgtgaactaaatatcttagaattctcttgacggcaatcaaatggcactctttaggctccgcttgaaaacgggcacacatacacacactaagcatgatgtcgggatgtcacgtcctgataaattcatcccgaaataaaaatcattttctaaaaggaataatagaattaattaaaatttgaaaagaaattggcaaacactaaaatacgtacaagaaaaattcaaatgtggcccggagaatttttgttaaattctccttggtctaaaaagagccctcaaattttagtggaattttcagagcacaaataataattattaagaaataaacaaagttaaaatgagtttataaaaagaaaaaccctaaaaagtcttttccccccccttcccctcttgggccggctcggcccacctccctccctctctctcctctcccccgcggcccaatcggcctcctccccgcgcgcgtgccgctgacgggcgggcccgcccgccaccctcgctgacgggtggggcccacccgtcatcccctacctcgcgccgcgcccgccgcctcgcccgtgccctagcgccgccgccgccgcggattccgccgcatcccgccgcccccgcgcgcaataaagagggggaaatcactccccgtgattccctccctctttcccccccacttttccctatctctctctctctctcggattcgtttggaaatcctcccgcaaacttcgccggcgtcattgatggagccgagatcgcccgcgccggcctctccttcctcctcgtcgacgtctcctccggcagccccttccgccgcgcccgtgcatcagccggcgctgccgtcccctccctcggcgtcgccgcatcgccctccaccccggctgctcctcggtttcgccggaacgccgtcgcagcgccggcctctccatcctcttcgtcgccagcgtcctttcggccgccccttcctcctccccggctcgtcggcttgctgcacctctaccatcttcggcatcgcagccgcgacgtcgtcctcggcctcgcctcccctccgaccgaacaccgccggtgtccgtcgtcgtcttcaccgttcatcctcgccggctcgccgtctcgcggcgccgcctccgtcgtcggcatcgcagcggtgtgttccacgccatcctcgcctccgtgcagccgctgccggctgccctcgtcgtctcctcgccggccccggtcgtcgtcgtcgtcgtcctctcgtcgttcccggtcgttgtggcgttcgtccctccgtcaagccgttctcgtccgccgcccgcgtttcgtcaagtgtgcagcagccccgtcgtcgtcttcgtcctcgcctccgcgtcgtcaagcctcgtgccggccctgtctcgccttcgtcccaggatcgccgccgaagtcattccctcgccgtccgccacgcctgttcgtcgttgttgttcccacgcctcgtcgcgtggtggtaaggatccgtcctctcgctgccctgtcctcgtccttttggtgtcgccccgtacccgttgtgcggtcgtcgaccccggtacccgtgtaccggtgtcggtagtcgttcacgtgtgcgggtggtgaccgtgtagtgtccgtgttagtgtgttcgctcggtagccgcgtggtttccacgtgtgcagcccgcgtggtgtcttgtggagtccgtttgtcggctactcgcctcggttgacacacggggtccgcttccgtcgacctgtggaccgtctctgtgtacctggtctaccgcggtcctttaggttgacatgtggggtccgcatgtcaacagcgcagccttcctgtcttttccaggctagcgcttcgacatgttttattgttgcaaagcttaattataataatccgcaaatctccatataacagcactaaacttcggatgatcatatcttggtcatacgaactccgaatcgacccgttcaagtctcttaatgtttgttataacctaaagaaccctgtgctttctttttatgtattgttattgcttctttataggcttgtagctttgcttgtgtgcttcgcgtagtcttcgtcgttccggaggttcccgaagcgtggttttcggtcgtcgccgaaggttcggaaggccgttctctctgagcaaggcaagtcacatcatccttgaacatattgaatcccagtttataaaattattttgatttaaattattgcattatcgctttatttaaattcccgcgttatcactgttttatttagccatgcctatttacctttgttatgaccttattattattgctattgttattattaccttgttcaccctaggaaaacaataccccaactagtgggtactctattcatggttccactagtatgaatttaggtagatgcttcgctgattaaataggacaacattaggtggtttttataactttagactttgggaattctcatatcatttggacactatggaatggttggcttatggtggaattggacatacacctctcttcctctttcaaaacccctaaaacctgttttccggtggggtttgggtgcatgccagttgtgggaagtagcaccccggccactataagaattaagctcgggcctctgttgcaaagcactaccgtacttccacatgtctagtgggtaaggcttagtttgtggctcagtctggttataaacaaaagtacacggatggagatggacgaagtcgggggtcgatggacatctctaggacaaatgaaggctacacgagctgcggcccggtagtcgagatgtcatggcacagggctggtgtcctgctgctaggggctcaatcctgcctacctgtcccggaggttccggccgtaggtggggttgggtcggtactcttgtctatggctaggatgggttggaaactatgtcacgtcttccgtccgtataccatggtggtatgtggcacgtggttacacgtgaggaagatgtgtcttgtgggtaaagatgtacacctctgatcagagtataatctattcgaatagccgcgccctcggttatgggcaagccgagcaatgtacccaagtcagtgttttaattcttaaaatttgctcaataactaaaatgtggaatggttggcctgggttggcttgggacgagctgggacccagggttgggttgccagttcggtctggatcatcgtaggccttgggttaaggcaggttcgtgagggttcacggccttgattaataatactgtgtagctctaggatcgtctttataaaatggctttgggcaactaagtgacttttaaatgctgttttctgcataacttaacccctatatcattaccccttgtacccccttgcattagtcgtgcatctgccggtgtggcttgctgagtactgtggttgtactcattcttgctctatctttctccccccttcagtaagagatgctttggagaagaagtcttaggtggagtcttggcttataccccagttgagcgcctgtgaagatggagccgtaggcccgctagtccgctgctttttatttttgattgtcaggccttaagtgcctttgtaataatgtaaatattatcgatataataaagatgtgtcttttatatcatgtttgtatggtgtaccctggcttttcctgggacggggattaatacactagcgttcgggaaaatgcaattttctcggtcgcgacaagctggtatcagagccatctcgactgtaggataagccaagtggataaaacctaaggacatattttataaataaaactatttgcgaaagttcctctttttcttcttcccctaatgctatttgcaaaaggtttacccttttcttccttcttcaaatttcaactagtactagatggtcaggtcagtgaagaagaagacatcgtcagttgttcgccgaagctccggaagactgcaggatccgctagcgaagtggaggaagcagtgaagccagctgtgaaggagtgaagatcttggagaacccgtcgcagaacctaagccaccctatagggtagtgttgttagtcgtgtgttccttgcttgtgtgtgtagcgcgtggtttgcatcggtgggttgtgatgtaaccatgctaggttgtttgcttaatcaacttgcagaataagtgaaacaaacaacatatcaacaagaagagttagttcctttaaggtcttgtccctagttctggtccattctttccttgtctgcttcccctctcaacctctaccttgtgacagatggataacactggtaacaaaggctatgggaatgatggatccgatgactcaagaacccaagccagtgggaatgagaaaagcatcaacaaaacctcaccagagctaatccaaattgtggttaaccaaaccaacatgttggcaacagcctttcaactattacagaattggaacaacccagcagggacaaccaacgttcaagtacctacagtccagcaacagtgcaagttatcagaatttctcaaaactgagcctccaacctttgccattgccgtcgatcctatggaagccagtgattggttgcgcacaatcgagaagaagctagggttgattcagtgcaccgaccaggagcgggttggcttcgcaactcctcagctggttggaccggcttcagagtggtgggatagctacgaagcatcacggccagaaggacataccatcacctggaacgagttttcatctgtattcaggagatcacatgttcccgcaggaatgatcacattaagaaaatgagagtttcgctatctgaagcaaggagatttgaccgtcacaaagtacctgcacgagttctatcgtttggctcactatgcaccagaagatgtggaaacagatgaagacaaacaagagaagtttctccaggggttaaaagatgagcttgcagtgcaactccttctagaggattactaagattttgagaaacttgtggacaaagccatgcaactcgaaagtgagcataatcggatgacgaactgcaagaggaggattgtcaacatcccagtatttccatgtggtaaccaaagacagcgcactgagccacttcagatcaccggatcttctgttgtgcatcaagagttcctgccccaagaagatggacgcaatgcagacaacaacactagcaatactaatgatgatgataccaccaacaaccatggttcttgcctcattagcgaccactcgaataaagcgtgcaatgtcagtagcattcaccaagatgtcaacgatagtatcaatgttggaatccagaatgacaaccttagcaattttgacactgagaaagactccaatggtgatagcaactatggtaccactgatgccaatgttagcaaggatttccaaccaccaattccaactccaagtcaaaatgatcgtccccagatggacagctcaacaaagaagacgttgatttgttacaactgcaaagaaccaggtcatttctctagagattgtccacagccgaagcgtaacctacgccatcactccggccattatgcaagaagaagacaagtcactcgccttgtggtcactggagcaaacgccatacctgtgaggcctcgagttaatcataacccatagtagaaacaatgtaccgatgttaagcatcttccctttttgtttaaggtagtgccttgtattcatgtaataagggagaaatgtgtaatacagacaagttctattaggattcttttggaagatgcggatatgtgattatgtgtataattgcttactgataaaggagacctagggtctcatttcagaggaatcatatactaatctcgagttaataaccaacctgttgatggcgaagaaaatcaagtgatcaaccaaagagacatttgtttggactaagagtttcagatgtgtcttcttcggatcaaaggcaacaatcgtcagtctagcttttgacgaactacttcaaggtttctctgaaaggcagcaagccaaaggacctcatcgtccccagaagcgtccgcaatccacattaaagaataccacctgttagagataagccgaaagaagattgataaaagagattggcaaagatgttctctagcatgaaagaagtaggccgaaaggtgattgataaacagaaacatgctctgcatcgctcaaggaagacccctgattgtaattgccccgcaacagtcaccttgtcattaagtaagcaagatgacctgggtaaaagtgtttctatgaaggcaaagagtgaaatcttcaactcggtatcagatgctacacggagtgaaaagtgcaagcaccggttaccaggcaatgccatgtcttgggagatgatccaatgggaaagaacacatcaaggttaaaggtataaaggaatacgttgaatgctaactgaggacaacctgaagataataatgggaagtaaactgaatgtaaagaaagtgaatccgagttgcttgttcgtgagagctattcccagttatgaatcaagtgatatgttcgaagataatctatagaggtcagattaaaagcacatctaacaacgaagcctcagatttggcaggataatgattagacaataacaaatccagcaataaagccatttgggaagacgtcaaagtatgtcaagtgggataagttggttctcttgggaagcataattcaaaggcaaagttatcgacccttgcatcaaatagcagaagtagctattacccggagaccgggaaagctaatatgaggcagttggtggcaagttagaagtgaatgacaagcacgatattcttatgatgacaaatatggtatcctagtaatgacaagctagtgttgacgcatgacatgaagtggtaacttgtatgaggttgactccgaaggtatgaatcatgagaagttctggagcggaagcatcattaaactaccgcaacctagtctgagtcagctaaaaggtgcgccctggttcaagtcaggtgaagagaagattccatccgcaacaggaggtcgagccaagcagtccagagtggagaagttttgctaggcaagttcgttatagaagacgcgacggaagaagtcaaacaagaagagaagaccgcccaacctatcttcatgctagcctcctcgaatctcggggacgagattcttgtaaggggggtggatttgtcacgtcctgataaattcatcccgaaataaaaatcattttctaaaaggaataatagaattaattaaaattcgaaaagaaattggcaaacactaaaatacgtacaagaaaaattcaaatgtggcccggagaatttttgttaaattctccttggtctaaaaagagccctcaaattttagtggaattttcagagcacaaataataattattaagaaataaacaaagttaaaatgagtttataaaaagaaaaaccctaaaaagtcttttccccccttcccctcttgggccggctcggcccacctccctccctctctctcctctcccccgcggcccaatcggcctcctccccgcgcgcgtgccgctgacgggcgggcccgcccgccaccctcgctgacgggtagggcccacccgtcatcccctacctcgcgccgcgcccgccgcctcgcccgtgccctagcgctgccgccgccgcggattccgccgcatcccgccgcccccgcgcgcaataaagagggggaaattgtcacgcccagaaattcactagtaatttccgaacttatttgtgcataaaatcctcgtccaggaatcagccgaggtacacaaactgacaatttaatatacagaatcatcaataatagtgttacatactttcaaaagaaaagaaaactgcagcggaattacggtctagcgaaggtccggctccactcccacaggcagctcaactggggtataagccaaacgtcttctccttctggatcctttttcttcaactgaggttgattgattattgcaagaatgagcatatgacatactcaacaagccacacagcaaatatgcaagtgcacaaggataccaaaggatggcataatataggctcatttgcaaaagcagcatttagcaaaacatttaagaggagtaaaacagtggagtaattaatcagaaattttaatcaacactgaacagcacacccatgctgcacaggcccaaccatcctgaacaaccatacccggctgtacagatctaactccaaaccaggagctaagcaaattattaccagatataacatccataattattgtgagaggtgtgagactaatcacgaaaaacattgctcaacccgcccataaccgcgggcacggctattcgaatagttttactctggccagaggtgtaccactgtacccacaagacacagcctcctcatcatgtctaccatgcgtcgcgatactggaaagtacccgaatagaggctgtgacaataccctttgcacaacacaactcaccacagtgcaccattcctggatcataatcaccccctctataaatataaccagaggcatggactccccagcgacccccacggacttctcgccgcttctcagtctggtgccccgcaatgaatcatgctatacagaaggtaaagccgttgcccatgctggcttgtggttggtacggttaatgtttcacaacagtagctcgtgaaccggtccttaattgtcatgagcacgaccttcaaaaccatgtgctcacaacccaccattgtcaagttttagttatcaattaattatcataacacgattaaccatcgtgagctacgattaaaccatcattaaacaatgagtcataagttatcccaatagtgtgctaatgtttctaagcatggctaagcaatcatatctaatatctagctgaaccaatatataaagctcaactagtcaagttataataacccaaggtatcaaggaataaagtaatcaatgcaaattggccataacaaaggaataggttcacaccacccggtgacattcgaaaataaatgcacagttgaaataaatagagaatttaaatataggatcaacatgctcaaaggattgtgtttagggtctgtgtgacttgccttgcaataatcggtcttcaattaatcttattgaatacttccggcgcactcacgaaccttcgcaacgacggaaacgacaaactaacacgcaaaacgaagaaaaagactaataaaaaccaaataaacagtacatataaagtaaacaaacatgtagatcctgattttagatgaatttagcaacttgaaccactcaaaaccgagttacgatgatttagttatgaatttccgaagatttaatctattagaaaaacaggaaaaagaaaaaaaacgatgatgacgtcatgatgatgacctcatcaatggccgaaccaagatggcgacctcgccggagattggatggtcggctgcgactttggaggacaagaacacgtagaggacgacgagacgaacccaacggtacccaccctcgaaccaaacgacgaacgacgacggccggcgacgaggtctagcggcggcgcggcttcggtcgacggcggcgacggggctgcggtggtgggcggcttcggggagatagcggccgggcttctccaccctcccgcgcacctaacggtggtaacggcgaccggcggcgacgacggaggcggcggcgcgacgcggatggagctcggccggcgacgacggcggggtggagcacgtggcggcggcgctacgaggcacgggagaccacgggagagggggcaaacgaaagaggaggactagggggtcctatttatagccttggattgaagagatcggactcctcccgcaagaaatcgatccgggaaatcaaaaactcggttttggagataaactcgaaaacgagttcgattcggataagatactcaacgattagctccgatttttgggggtaaagatagaggaggataagaggaatatttcccctcaactaattttagaaaaacacaaggggaaaggtcagatttggaggagaaaaaccgagccaaatcggtctcagttcggctgctagaggtagaagataaacagtgtcgagggaggcaaattagacttttcgtcttgggctggctgaaaacaaagcaaagaaagaaagagaagggggaagctcggctgggccgacttgggctgcacggccgtgcagacaaaagagggagatgggctggaaagggcccaagactaggaagaggattattattacttttccaattaaattaatcaatgaaatgatctttaaattgttaaaaatacttcctatgctcaaataattccaagaaaaatcttgaacatacttggacacccaaagtatttaacaatattaaaaaaagaccatttaatgattaatttaatatgtgggtaattactgaaatgctctttgtatgattaaaaattaagaattgagctccgaaacatctgagaaaatttcagagagtgtaattaatcatggagaatttaatcaaaattaaatccatccatgctttatatttaggaaattttatttcccacatttaacttcacttgtaaattaatgaacatttaatataaattctaataataatttattaaataatttataaatcctgaaacaaaaatcaggatgtgacagaaatcactccccgtgattccctccctctttcccccccacttttccctctcgctctctctctcggattcgtttggaaatcctcccgcaaacttcgccggcgtcattgatggagccgagatcgcccgcgccggcctctccttcctcctcgtcgacgtctcctccggcagccccttccaccgcgcccgtgcatcagccggcgctgccgtcccctccctcggcgtcgccgcatcgccctccaccccggctgctcctcggtttcgccggaacgccgtcgcagcgccggcctctccatcctcttcatcgccagtgtcctttcggccgccccttccacctccccggctcgtcggcttgctgcacctctaccatcttcggcatcgcagccgcgacgtcgtcctcggcctcgcctcccctccgaccgaacaccgccggtgtccgtcgtcgtcttcaccgttcatcctcgccggctcgccgtctcgcggcgccgcctccgtcgtcggcatcgcagcggtgtgttccacgccatcctcgcctccgtgcagccgctgccggctgccctcgtcgtctcctcgctggccccggtcgtcgtcgtcgtcgtcctctcgtcgttcccggtcgttgtggcgttcgtccctccgtcaagccgttctcgtctgccgcccgcgtttcgtcaagtgtgcagcagccccgtcgtcgtcttcgtcctcgcctccgcgtcgtcaagcctcgtgccggccgtgtctcgccttcgtcccaggatcgctgccgaagtcgttccctcgccgtccgccgcgcccgttcgtcgttgtcgttcccacgcctcgtcgcgtggtggtaaggatccgtcctctcgctgccccgtcctcgtccttttggtgtcgccccgtacccgttgtgcggtcgtcgaccccggtacccgtgtaccggtgtcggtagtcgttcacgtgtgcgggtggtgaccgtgtagtgtccgtgttagtgtgttcgctcggtagccgcgtggtttccacgtgtgcagcccgcgtggtgtctagtggagtccgtttgtcggctactcgcctcggttgacacacggggtccgcttccgtcgacccgtggaccgtctctgtgtacctggtctaccgcggtcctttaggttgacatgtcgggtccgcatgtcaacagcgcagccttcctgtcttttccaggctagcgcttccacatgttttattgttgcaaagcttaattataataatccgcaaatctccatataacagcactaaacttcggatgatcatatcttggtcatacgaactccgaatcgacccgttcaagtctcttaatgtttgttataacctaaagaaccctgtgctttctttttatgtattgttattgcttctttataggcttgtagctttgcttgtgtgcttcgcgtagtcttcgtcgttccggaggttcccgaagcgtggttttcggtcgtcgccgaaggttcggaaggccgttctctctgagcaaggcaagtcacatcatccttgaacatattgaatcccaatttataaaattattttgatttaaattattgcattatcgctttatttaaattcccgcgttatcactgttttatttagccatgcctatttacctttgttatgaccttattattattgctattgttattattaccttgttcaccctaggaaaacaaaaccccaactagtgggtactctattcatggttccactagtatgaatttaggtagatgcttcgctgattaaataggacaacattaggtggtttttataactttagactttgggaattctcatatcatttggatactatggaatggttggcttatggtggaattggacatacacctctcttcctctttcaaaacccctaaaacctgttttccggtggggtttgggtgcatgccagttgtgggaagtagcaccctggccactataaggattaagctcgggcctctgttgcaaagcactaccgtacttccacatgtctagtgggtaaggcttagtttgtggctcagtctggttataaacaaaagtacacggatggagatggacgaagtcgggggtcgatggacatctctaggacaaatgaaggctacacgagctgcggcccggtagtcgagatgtcatggcacagggctggtgtcctgctgctaggggctcaatcctgcctacctgtctcggaggttccggccgtaggtggggttgggtcggtactcttgtctatggctaggatgggttggaaactatgtcatgtcttccgtccgtataccgtggtggtatgtggcacgtggttacacgtgaggaagatgtgtcttgtgggtaaagatgtacacctctgatcagagtataatctattcgaatagccgcgccctcggttatgggcaagccgagcaatgtacccaagtcagtgttttaattcttaaaatttgctcaataactaaaatgtggaatggttggcctgggttggcttgggacgagctgggacccagggtcgggttgccagttcggtctggatcatcgtaggccttgggttaaggcaggttcgtgagggttcacggccttgattaataatactgtgtagctctaggatcgtctttataaaatggctttgggcaactaagtgacttttaaatgctgttttctgcataacttaacccctatatcattaccccttgtacccccttgcattagtcgtgcatctgccggtgtggcttgctgagtactgtggttgtactcattcttgctctatctttctccccccttcagtaagagaagctttggagaagaagtcttaggtggagtcttggcttataccccagttgagcgcctgtgaagatggagccgtaggcccgctagtccgctgctgtttatttttgattgtcaggccttaagtgcctttgtaataatgtaaatattatcgatataataaagatgtgtcttttatatcatgtttgtatggtgtaccccggcttttcctgggacggggattaatacactagcgttcgggaaaatgcaattttctcggtcgcgacacgggacgagatgcacataagtaaagcaaagatcctatcatggagcgatataccttttggtccacacatttaccattatcgttgtggtctaggtggccattagtaggcatgggcgtcttgataggtttggcatcctccatcccaaacttcttgagtatgtctttcacatacttggtttgagagatgaaggtgccctcttgtgcttgcttcacttgtagcccgaggaagaaggtcaactcgcccatcatagacatctcgaaccttttagtcatgatactactaaattcttcacaaaaagaggcattagtagaaccaaatattatgtcatcgacttaaatttggcatatgaataaatcactcttatattttttagtgaagagagtagtgtccgcctttccaattttaaaaccattcttcaaaagaaaatctcggagacattcataccaagctctaggggcttgattaagcccgtagagcgccttgtggagcttgtacaaatggtttggcaactttggatcctcgaaccccggtggttgctccacatagaccaactcagagataggtccattgagaaaggcactcttgacatccatttggaataacctgaaatcatggtgagcggcataggctaaaagaattctaattggctcaaggcgagcgacaggtgcgaaggtttcaccaacatcgtggccctcgacttgggtgaacccttgcgcaactaaccgggctttgttccttacaaccacctcatgttcatctttcttgttgcgaatgatccacttggtgccgatgacattttgcttgggtctctccaccaaagtccatacttggttgcgagtgaagttatttaactccccttgcatggccatcacccaatccggatcaccaagcgcatcttccaccctggttggttccaaagaagagacaaacgagaagtgttgacaaaaacttgggacacgagagcgagtagttaccccttttcttatgtcaccaagtatgttgtcgacgggatgatctctttggacagtgtgatgtatccttggatggtgcactgggggacctgagcctgatcagtatgctctaaagtgcccgcagcatcgatcccatccacttgtgccgttggcacgttttcactgccactggtccggaggttccagactgtagaacccggaacttccggaggttctgatcaataggacccggaactttcagctcagcaaagacagcacttgtagggctattggatgtcgatgacggaggttgatccctatcttgttggtcatcctgcgtctcgactggtcgtatgtctccaatagccttagtgcctatagctttacttggatccacatcacctacaacatgtacaacaacttacgctccttgggagccattagattcatcaaatgtcacatccctagtgacttcaacaataccggaggttttgttgaagacacgataggcatgtgcatttgattcatagccaagtaagaatccctcatccaccttaggtgagaacttagatgagcgaggcctcttacttaaaataaaacatttgctcccaatgacacgaaaatatgaaacattaggcttcttaccactcaagagctcatatgaagttttttttaggatcttgtggaggtacaagcggttgatggcatgacatgtggtacttacggcctccgcccaaaagacatccgaagtcttgtactcatcaagcattgcccttgcggcttcaataagggttcggttcttcctctcaacaatgccgttttggggaggatcatagggggcggagaactcgtgcttgattccttcttcatcaagaaattcctccacttgagtgttcttgaattctcctccattgtcacttcgcaccctcttgatagtgagatcatagaggttttgggcttgctttgcgaagcgcttgaagacatcttgagcttctcttttgtcatggagaaagtacacccaagtgaagcgtgaaaaatcatcaacaatgacgaaaccatacttgttacctccaatgcttatgtaggccacgggcccaaataaatccacatgaagaagctcgagtggtcttgttgtagtcatgatgttttttataggatgtggactgccaacttgcttcccggcttggcaagcactacacacacgatcgagacccattacctttcctttaccatcatgtccaaagacaatattttcacgacttccaccctcctcattaagacttgtaaacatactcctctctcccatcatatgattggtgcagccactgtccacaacccaacttgagccactggaggagtatgcctacaaaagaaatcaagcttgggatttaggaacccaaacttgtctaagtttgggtcccttgatgttagtcaccaaagcctttggcacccacacacaagtacggtactcatcattgtaattcccattgaaataagcaaccactttgccctctgaatttttgaaaattacatatgaatcatagtaaagaccctctagccagaacttcctgccattatacccggaacttccggttagtccgttcggcctatcagaagcccggaacttcctgacaaaatgtccggaacttcctgtcttacagggcaggaacttccggtcattttgctcggaacttccgggtgtctgaccagtgaggggacaagtcacctcacttgcttgtggagcttttccttctctcacaaacatcaagcattctttcccatttaccatcacacgcttagacacatgacttccaccagaaaacccgagcccatgtccatccttgttaggatgagcggtgatggtcttgtaaagggcatcttttgaatgatatgtcttcacgcatccatatttcaccaatgtgcccaattgtcacgaccggaaataacccaacgggcgttccttacgtgcgtgcattatttcttgtcccaggaggcaaggtacaccaaaagttgatacaattcagagtttaacaagcggaagcgtaattaattaatttattacatgggcggcgaagacccagcacacaagaagacaaacgaaaaacagcggaagactagggcgatgaccacaggcgcttgacggcaggcacgagctagacaccaaagccttcatcttccaggggctcctcttctgggtttgggcaaaattgagcaagactgagtacaaccaccgtacccaacaagacacacccacaagtgcagaataaatgcaagggagtacaagggggttaaaatataaagggttagggtttgcagtaaacagcattaaaagacacttagttgctcaaagctattttgtatacacgattctagagctaaacaatattattaatcaaggccatgaacccacacgaacctgccttaacccaaggcctacgatgattcagaccgaactggcaacccgaccctgggtcccagctcgtcccaagccaacccaggccaaccattccacattttagttgttaagcaggttttaagaattaaaaacactaacttgggtacattgctcggcttgcccataaccgagggcacggctattcaaatagattatactctgatcagaggtgtacatctttacccacaagacatatcttcctcagatgtaaccacgtgccacataccaccacggtatacggacggaagacgtgacatagtttccaacccatcctagccatagacaagagtaccgacccaaccccacctacggccggaacccccaggacaggtaggcaggactgagcccctagcagcaggacaccggccctgtgccatgacatctcgactaccgggccgcagctcgtgtagccttcatttgtcctagagatgtccatcgacccccgacttcgtccatctccatccgtgtacttttgtttataaccagactgagccacaaactaagccttacccactagacatgtggaagtacggtagtgctttgcaacagaggcccgaagaccggtccttatatggccgagatgctactatcaaaaccatgcaccccgagcccagcctaaaaccattttgagggttttgcatagagggggaggtgtgaatccaattccacaataatccatccattccatggtgtccaggtgatgagaatattcccaaagtctagagttgtaaaaccacccaatgttacctaattaaccagcgaagcatctacctaaaatcatactagtggtaccatgagtagagtgtccactagttggggttttgtttaatctagggtgaacaaggtaataatatcaataacaataataataaggtcataacaaaggtaaataggcatggctaaataaaacagtgataacgcgggaatttaagtaaagcgataatgcaataatttaaatcaaaataattttataaactaggattcaatgtgcttaaggatgatgtgacttgccttggtcactttcccaaacgtcggcttcaacctccacgaagagcggatcttccgaagctgcagcgtctacacgaccaacggtaaagaaaaggcttttactctaataaactctatataaccagcaggaacaaagcacaaaaatgggttcttgacttcttaaggaaaaattagagacttgaacggtccaatttcgagttcaaatggccaagttatggccatttgaagtttatatgctctttaaatgaatatttgcgactttcttcatttaaattttaatttaaaaagggtttattgcgtcagccgagggggaggggcgcgcggaccgggtccacgggagtggggcccacgcggcagcctcacggtccacggtggaccgggcgcacccggctcgcaccggccagcgccatggcccccacacgtcagccgcacccgagggcgcgggcggctgacggccgggccccacgcagcagccactcggcgcgcacgagggcggccacgccggcgcggtcggcgggaggcggcgcgcccgcgccccgagggtcgccgccggcaaccaccgacgcggcggagcggcggccgagagaggggagggaagggggaaaggaggcgtcggtccacggctcaccccggggtgacggcggcgacggagggggcggtcggagcggagggaggaggcggcgcggctcgggtcgacggggtcgacggcgttccggtggtcggcgaccgaaacggagaggtggacgaggtcggcgaggatgcggcgaagccgaaggaggcggcgccgaggtgggaggcggtccagggcgacgacggcggcagaccggagctcggcggcgacggcggagagagagagcgatgtcgcgggctcgaatccggcgaggaggaagggcggcgagaggcgcaaacggacggaggaggtgcagggagggtttaaatagggttggaagggggagagagcggccggaggggaaggaaaccggcgcgggaggtccggccaccatcaatggtacaggtgagatttgcgggggcaaatccgcccgtttgaacgcgagagagagagggaaaaatggggggaaagggagaggggatcacggggagtaattccccccactttattgcacgcggggacggcgggaggcggcgggattcgcggcggcggcggcgctagggcgcgggggaggcggcgggagcggcgggaggaaggggatgacgggtgggccccacccgtcagcgatggtggcgggcgggcccgcccgtcagcggcgcgcgcgcggggagaggccggatgggccgcggggagaggagagagagagagggggggagagatgggccgggccggcccaagagagggaagggggactttttagggttttttgttttttataaaacctttttaactttgtttatttcttaacacttattatttgagctctgaaaattccactaaaatttatttacgtattttaggcttttaggaaatatacaaaaatcctctaagtattatttgacttttaactttgcacattttaattgttggaggctttcacacggattttaattattctaggcataatttagaggatatattttagggtcgttttgggacgtgacaccaatctttcattctctttcttaagagcttgcatagcatcaacattagtagcataagagttcaaatcaatattgtaacacctagcacaaccattgctagtagatgggttggaagaattagaaaccacatttggttgagaagtgctattccaaagagtgtcaaattgaacttcaagatctttatgacttttgtctaaactagcaaatttctcttgaagagtttcattgacatccctacggctagctagagaaccattagccaaattaagctcattagctagttgttcatttttagcacattctttagctaggctctcctctaaggcaaggtttcttttcttctcaagaataagtaattcttcttgcctttcgagagattgttctttactatccaaagctctcattaacatagccaaatgttgcatagcgggtttgctaaagctcttaagcacatcatctaattcattatcactttccgcatcactagaatcaacatcaagagagatgtgagaggacttttgagtcatcaccttgcggccttgggccatgaaacaagagtagtggtaggagtcgtcgtcgtcatcactccagttgttgaagagacgctccttgattgaagaggatgacttgaaggcgacagtagcaacaccaccttctccttcaaccttgtcttgaggcttgggcttgggcttgacctcgagatcttcttcatctccggagtaccacacctccgccatgtgtgcctccgccacatgagcatgctccggcttcttcttgcctcccttagccttagcttcatttgacttgggacaatcggcaatgaagtggccatgttcaccacaattgaagcaagctctctttgattgcctctttcccttgtcatcatccttcctccctttgccatagccactcttgcgaagaaagtgcttgaatctcttgacaataaaagccatctcttcatcttcactttcttcacaacatgactcttcttcttgttttgccttcaaagcaacttcttgatttttgatcatggcggcattcttcaccatttgcctcacttcacgagcttcctcttcttgcatctcatgagacacaattcttccaagaatgtcacttggggtgagactcttcaattctttcctttcccgtatcattgatacaagagtaggatttcttggaccaaatgcacggagaagtctcttgaccacaaagtgatttgtcatgtcctcactcccaagtcctttaatcttgttgacaaggatcatcatcctatcatacatctcttgtggtgtctccatgtcatccatcacaaatcttccaagccttccttccaataattcaatcttggcctcacgaacggcgggtgatccctcatgagccaattgcaaagtatcccatatctccttggcctcctcaagcccatcaaccttgttgaactcctccagactcaaggcggagagaattgcattggaagcttgagcattgcggtggatgagttgttcttgctccgaagtgagctccatgttatcatggggtacatcaacatctgtacaaacaactttccaaatacttggatgcaaagagattagatgcaacttcatcttgtgcttccaagcggcattatgtgtcccatcaaattgaggagcatgcccagaaggcacggagacaaagttgtgagggggaatggtaagtttgctgtaatcaaaaggtatagtagctcccttgggtgatggagttcccttgctgctcgctccatcttcatttccattttccccgttctttccccctaagtccgacattgtggatcactcaaagcagtgaagcttgaatcaagagcaccttgctctaataccaattgaacgtgctgatgaagcctagaggggggtgaataggctgtccctgaaaacttaaaaacaaatcgcagcggtaaaattcaaacagacccggaacttcctggtaaggaactccagaacttctggcctgccaggcccggaactaccggtgttcttaggacaggaacttccgggttacagaacaaggatgaaattcaaatttcgaatcaggagactaagccaatcttcacaagatgatgcacaggtattctaagtaggagatagatcacagaaacatccacagaaacatcacagaaagagacaagagcatttttttcctgatgttcggatcttgcgatcctactctccgttgaggagctccaaagagctgggtctcgattaacccctttgcctgacttgtgcaaaaactccagaggaaatccacagccttcaactacaaacacccctaggcaagtttctagaattgagtgaccaccaagatccaactcaaactacttctagaaattcgccacaagtatacgttgctctacttggaaaacctctagaatctcagcacaagaacttaattaacttacctcgttcccttttggaggagaggagatccttcacaaacttacccgggacatccacaatatgcaacggattctcgcgggcgacacctaaccatctaggagatcatctccaagagtaataagcaccgagatgacagcccacaagatattccaagtgctcacccaagatcctagtcttcacacatctccaaatcttcttctcttcctctcaatctctctttctcataagaattaggctctagattgagtggagaaggcaagaaacacttgggagaggctagcaacagctctaggttcaaaaagtgaaagtggaatggccaatgaacaagctggaaacgagctgtatatgtgacgtcatctagccgttactcacaaatttgaactgaaaactagacaggaagttccggacctagaagacaggaacttccggataatacttaggaaaatttctttcatcatactggaacttccggacctggaaacaggaagttccggacttgcatttttggaccaatggagcatttgcaaaaatgactcctagggaaacttgacacttggttcacactaagagcacttgagatatctcagagcatcacctagaaccccacttaatagtacggtttttcctaaaaactcgattgcaaaaaataaactatcctatgcacttctcgagttccggtccgctttgattttatacttttggggggtctccaagcatccatcttccacaccttgaactaatgcacctaaaagatactcaatgaactcattagtcccttaaccacatttgtcattaatcaccaaaacccactagggggattaatgcactttcagttgtgctggaacatccaaaggtacaacgcggatactggcctctatcttgtcaactggtggctggggctgaaattgagcattgacaccttgtggtagtgcactcattggagtgggagctattgcatcttgggctatacgactgcttcaggacgcatggatgacaattcgctgaggagcaagcttctgattgaggggagttgcatggactgatgtgctggcaaatatgtttctcggtttcgggcacatgtcggcgaaatgacccacttcttgacaattgaagcaacatatatctttccagacttggcattttcttttcccattttgattcctctgtcttggcactggagttaggctgaaactgtagtcttgtcgaggatttgggttgccttgatgcttctctccattgtaactggcgggttggttggccatcttcttcgtcagcagaaaactgaattgacaatcttttggtacatgattagttccttcacacaagaaacaagtgatcctgctcgttggacactcgtcgggtggatggtcttcctcacaaggaacgcaagtggtgacacatgagctggcaaagtgaccgatttctccacaacgagagcatgccttatgttcctttttattctgattgaaaccttggagagacttctcatcttcatcccgtgaggagacttgatctgaatcttcgctatcagacactctacctccattagccaaaagatgttctgtcaactgtggtgcacctcggaagaaatttcttctctgacgttttgtcattcctggtggaggccattctgtgccggtaatggtcatcttacggacctcatcttcggttcgcattggtgcttttcttttctgctgaggacggttccttgcatagtgcccttgttcaacacagataaaacaaatgattcttgcttcttttgagtccacaagtggcatggcacgatgggcctgttgggatgctggcggagcgctgacttgtggtgtgagtgcttggactgcctccaactgcacttgaggttgcatctgactcgggttcagaattggcgtctgatgctgctgtagtatctctataagcaatttgttctggttaatcaggtgttggaccactgccatacaactggtgtctggtgcttcattcactcgggagcttgaggtacccacgtcctgatttctgaccatactgccttttttattgtcagccatctgttactaggtttggagagggagagagggaaaacaaaaggggagagacagattagaaactaaggataggaccttaacagatctattttttttctgttatgatgtatgttaggtttattctgcaagttgattaagcaaacaatctagcatggttacatcacaccccactgatgcaaaccacgcgctacacacacaagcaaggaaacacacgactaacgactctaccctagagggtggcttaggttctgcaacaggttctccaagatcttcacccctgcttcacagctggcttcattgcttccttcgcttcgctagcggatccaacagtcttctggagcttcggcaaacgattgacgatctcttcttcttcacaaagctgaccatctagtactagttgaaattcgaagaaggaagaaggaagtaaaccttttgcaaatagcattagggaaaggaggaaaaaggaactttcgcaaatagtttcatttataaaatatgtccttacgttttatccagttggcttatcctacagtcgagatatctctgataccagcttgtcgcgcccggaaaaataccttttccataacactagtgtattaatccccgtcccaggaaaagcacatcaggcctgacaaacatgatataaaagacacatctttattatatcgataatatttacattattacaaaggcacttcaggcctgacaaacaaaaataaatagcagcggactagtgggcctatggctccatcttcacaggcgctcaactagggtataagccagggctccacctaagacttcttctccaaagcttctcttactgaagggggggaaagatagagcaagaatgagtacaaccacagtactcagcaagtcacaccgggatatgcatgattaatgcaagggagtacaaagggtaataatataggggttaagttttgcagtaaacagcatttaagagtcacttagttgcccaaagctattttataaagacaatcctagagctacacagtattattaatcaaggccctgaacccacacgaacctggcttaacccaaggcctatgatgattcagaccaaactggcaacccgacctaggtcccagctcgtcccaagccaacctaggccaaccattccacattttagttgttaagcaagttttaagaattaaaccactaacttgggtacattgctaggcttgcccataaccgagggcgcggctattcgaatagattatactctgatcagaggtgtacatctttacccacaagacacatctttactctgcattccacggccgtggaacccgtggtaaaggatgtgacataacccctttacccatcctagccgtgacaaaagcaccgacccaacctcgcctacggccggaatcccgagacaggtaggtaagattgagcccctagcagcaggacaccggccctgtgccatgacatcttgaataccgagccgcagcccgtgtagccttcatttgccctagagatgtccatcgagccccgacttcgtccatctccatccgtgtactcttgcaaggactagactgagcaccgagttaagccttacccattagacatgtggttagtacggtagtgctttgcaacagaggcccgaagaccggtccttatagtggctgaggtgctactagcagaaccatgcacctcgagcccagcctaaaaccattttgggagttttgaatagagggggggaggtgtgtgttcaattccaccacaagccaaccattccacagtgtccaaatgatatgagaactcccaaagtctaaagttataaaaccacctagtgttgcctaattaatcagcgaagcatctacctaaattcatactagtggaaccgttaatagagtacccactagttggggttttgtttatcctagggtgaacaaggtaataataacaatagcaataataataaggtcataacaaaggtaaataggcatggctaaataaaacagtgataatgcgggaatttatgtaaagcggtaatgcaataatttaaatcaaaataattttataaactgggattcaatatgctaaagggtgatgcaacttgccttgctcagagagaacggccttccaaaccttcgacgacgaccgcgaaccacactttgggaacctccggaacgacagaagctacgcgaagcacacaagcaaagctacaagcctataaagaagcaataataaaacataaaaagaaagcacagggttctttaggttataacaaacattaggagacttgaacaggtcgattcggagctcgtatgaccaagatatggtcatccgaagtttaatgctgtcacgtggagatttacgaattattgtaattaggctttgcaactataaaacatgtgtaagcgctagcctggaaaagacaggaaggctgcgccgttgacatgcggaccccacatgtcaatctaagggaccacggtggaccgggtacacagagacggtccacgggtcgaaggaagcagaccccgtgtgtcaaccgaggcgagtggccgacaaacggactccaccagacaccacgcgggctgcacacgtggaaaccacgcggctaccgagcgggcacacaaacacggtcaccacacgcacccacgaacactactgacaccggtacacgggtaccggggttgacaaccgcacaacgggcacggggcaacaccgaaaggacgaggacggggcagcgagaggaggcaccgttaccaccacccgaaaaggcgcggcacgacgacgacgaacgggcgcggcggagacggctcggggacgacagaggcaaacgacttcggcggcgatccttggacgaaggcgagacgcggccggcacgaggcttgacgacgcggagccgaggacgaagacgacaatagggctgcagcggctcgcttgacgaaccacaggcggcgaacgcgatcggcttgacggagggacgaacgccacgacgaccgggtacgatgggaggatgacgaccggaaccggtgaggaggcgatgagggcagccggcagcagctgcacggatgcgaggacggcgcggaacacgtcgctgtgatgacgacgatggttgcggcgcagcaagacgacgagccgggcgaccgacgggacatcgacgacgaggacgaacggagacgacgacgatggactgcagaggggtttggatggaggggaggcgatgccgaggacgatgtcgccggctcgccgctgcgatgccggaggttgtggtggcgcggccgacagcgcacgggtgaaggaagggccgaccggggaaattccggcgaggcggatggagaggccggcgctgcacggcggtgttccggcgaaattctgtaacatacccaaattctagaccttaaaaatttcctatcaaaatagttggaagctaacttttccatttttgagagctaaaaatttccatttttaacctaggtgtggtcaatctaacttgaacctaagtaaaatttgagaacaaattaaaactttttcatttataacctaggacataaatgcaaacacgagtaaaagcatgcatacttgcataaaacatgttttgacttgagtccttcatgtgcatttgaatatttgatttgcatttcataataggtctgatgaatattaactaagatctagataaacaactaaaccattatggcctagtgctagctagaggaagttaaaatagaaaccatacaccttaaaatatatcaacatggctaatgtcaagcctcacaaaactaatttggacatccatctgaagacatgtcatgaacatgaaagtgaacaaataaattatatcatatagggtatattctatcttaatcatctctaagcattctcttaatttaatactaaagtaaacttatgcataaataagtaaggagcttatgacatgtgtaaggtaaactgtaattctatcatatcaatatcacctcaggttaatgagagtccaaatataacttttataaacatttacatgcatttaggaaagggaaacacatataagacataagtcttgcgaattatctaaaataattcgtgcaagataaaatcatgggaaaattcctgtaggctctactcaactcatacaactcactgtaattttggtataatttaataactaaatttggtacctcaaataaatcagtcaaactaataaaaactagattaaccgtagttcttaatcggctaaaaccatactttatctaaaagtgcatttaactgcataaaagtgtataagtaaaataatttattcaaatactaggtcatttatcatgaataaaaataatttttccagaatttatcttctctgtttaaattactaaagtgggagagagaaataatcctgaaaatcattcaaaacttttgttcacccacgtttctgcccaaccctctcaccctagcttagtttgccacgacctggacccacttggcagccactctggctcgtcctcaccttgtgcaaatcttccagccgaccagagacagccgagagagagagagagattggcgccggctgtgtacgacgcgtggccacaatgtgtcgacgccatcaaactcctattctagccttctcctcctcccagctgcatctccacacatcattctccacctctaagccgaagaaaccgagggaggaggctctcaacttctccgtcgccctcatccttgctgccggccgcgaagaagacgactatcgtacttgtaaataagccagggtaatccccatctctttcgcgttccatactcttctcaccatgccgatgatttatccttttaatttcatcctctatcgtgcagcggatcgacgggaacgccgtcgtgcccacggcactccggagcgcgctccaagcgccgccgcagccgacatcgtcgtcgttccgaccattgtagaccaaacaaagccgagccgtcgcgccaacgtcttctccttgaagtcttcctcaaaaaccctcaaaaatcctaggcaatggcgcagcaagtgcggagatcggctaccgtcttcttcacctccggtcgccgtcgccattgtcgattccgcctcctccggtgagccattgtccgattcttcgcgtatacaccatccctgggacctcactaaccccatgaaaacacatggatgtcaattcgatgagtggatcgagccgttgccgtctccccggagctctacaccgtcgccggaccatcttcttcaccgctgccgctgtccagactttcccgcgcctcgttcaaggttcggtgagcacacttgagcccataggattgcattcatgcatttcattcacttagaatcgagcaccaactcaacatgcagtagcagcctaagcacagccgccgctcggactcgccgccggcgttactccgatgtccactgaccgagaaaagtagaggaatggaatcacaatagcatgatcgtcattttgtcttttggtcgcaccctcaaccgagccaccgtttgccgctggcaagcttgagatcgagctcagccatggcttgatctgcttcagctcaaaccagggacctcctcacaagaatttaggttaatgtagggttctttctgcaaaagctcaagacacacagaacagtcataagactgcggtttgatttcctgaaaccctaggggcctttttgcatattggcctgagaccgacaagtggaccccatgagtttaaaatctgaaaatgtaaaagataatactaaaagcctttactttttaacagcaaaacacctaaacttgtaaaatccatataaaatcaaatataacttattttgagatgattcaactttctataggttcacaaaactatgaactttaatgtggtaacattaagcttggcaccctcagcacagaccttgtctctaaaatgggtctaatataaatcatacataaagcatacacaaacttataaaatgcatataaagtacatctcaactcattttggagcaaactcagtttctacagatccacaacttatgttctcctataaagcaaaatgaaatagtatacatactatacatcaaatgcctctaaaactattacctttgaatgactagttttagataagctgaattttagaagttcatataaaattcatcttagatcctttttgagtaaacccaagttctgtagaatcaccaaaacatatacttccaagttataaaataaaattatatacttactgtatgataaaagcctctaaatacttatgtaagtaataaccaacatacagaaaccttaaattgtaaaatttgtagaaaattcatctttagtctaaatgaagtgaaccaaatatctatagaaccagcaaacagtgggcttcaacatagtaaaataaaatatggaaccttctgtacaggttatagctctaaactttaaatttataggataggtgctaatcacatagtatcgattgagcaatatgtatatatataaatgtatatagaaatacactctagctataatgaaacccaaataaaacttgttagactagtgaatgcatagttccatccccatccaccaaaacttaaggcacttagctcatataataatttctaggttgatataataaattgctagcatggactagagctcctctagtttataaaatatgaaccatgataataaagaccataagcctatgaactaaggttagattagttaactaaaatactcattttatacatcactagctagatgaggcaagttctggacctaaacctctaaagccatgaaactatagaacactatacacctataacacgttataacttgtaaaatacataaagaattcatattaagtccaaaaattgtgaaaccaaatgtgttagtcttagaaaacactcctctacacctctgtgaagtcaaaactaataaaaatcactttataaaaatattttataacactacctaggtgatactaccttatactgaggaaacttctaaaattcataactcccaaataaaaagagataaaatagaaattctttcacctaaattcatattataccagtacctattcactgtgcaaaaatcatcaattttagagcattttggatttttcgcatatttcggtgtttaattgcataacgtgtactttgtatagatgattgcttaaacggtgaagaagtgatttaggtgctgacattttcctgattcaaggcaagtcccacctccctctctttgatcactttgaacctatgttttggaggttattgaaaatgtttgcaaatcttgcatgtcgattgtacactaataaattaaaattttgttaaacttattagataaactcctattatttgcattatcaccttaaatccacatatatccatattcctcattcctaaccttaggaacaatatgactataccaatttatatatgagttttggtgacactaggttactataaagcttaaccatgcttagaatggtcttccttgtcattatgggctcattacaaacatgaaaattgatttttaattaatctggacagaactttaatacttgtgattttgataaataaaatggtggaaaacatggattttaggtttgggcctcaagtggtgcacatatggtgattagttgtgtaccgatagggggagagtgtgcccaaaccgacctaaggacttcactcaatgtcagttcatttcgtatacggtgcaaccacatgtgctagtatgggatagcccaagcttagtaaattatttatggtttagccttacattctggtaggccggtgtgtatgagttcatataattcagaggagcttcctatttacctcgaagtggtagtttaggtgacctagcgtgtccaatacaacggtattgtgccacgtggtgggttcccgttgtatccgccaccacggcgttaagtttaaggcgtgggcccgccacttaacggttttaggtcatataacatgtatggcttaggatggagtaacacgtatcgtgctggtgtaaggttaaatcatgaattttgaaaaagctttattgcgggtaataaatcgggtacttatgtatcgcgtgccatgctcttgcatgattattattttgcatcatgtgggtaaagtgtacaaactatgcagagtaaaaactaatcgattagccgtgctcacggacaagagcgacgtgtggatatgtattgagtatagacttgtgtttattcttcttaatgctaaaatttaccttcaaattgtgatgagatttgagaatgatctccttgctgccatggaaggcaatgaggtgcatatttatacatgattaatgcctaccttgatgcccaatatgtcaagtactagcttgctgaaatttatttgaaagtaaacctgatttagaaatgttttatgcaaataaaacttgctttatgctaaaaagaaccatattatgccttccttgattatatgccttgcaagtagggtgttaggcttgtcttgatgcttgccagtacattatttctaataatgtactaactcttgctattgaattaatcttttgcttgcaggttttagacttagtctttgagtgatgcgggtaatcgactgcttcttctaggacttgaatttaatggggtaaatccctagtcggtgtgcttgtggattgggtagacaagcttccgctgttctatatatttatttggccagtcggccaatgtaactaaagtagatgtagtttataatcgctttcatcttatttgtgtttgctatgtataatcatgcttgagatgaaagtgtgaatctagtgcacatcctgggaactagattcacatgagtatgagttaagaatatttgagatgttgtagatctttagccatttttgtcaagtctcatgaatgtgtaacacatctggtcaccgccttcgagtggtttgacgggcacatctcaggctaaagttgactggcaggctaaaggcctagcaatgtctccaatattcttctctcgaggcgtcggatgtttcattatgtttgtttgatgacttgaattattcacttcatccctcaaatataatggaagctccggaaagcctacgacaaattcgggcgacgccgtggcctggccggggaagaggacagcattccggtgccgggagaggtggtggcgacgtcggccgacgcacaggagatgcggcagaggcggccggaggcggaacagtggcagcaacgccactgttgccggtggggatgcacttccggaggtctccgcgggaaatggacggcatgccggggaaggggaggtgactgcgacgccgggggaggcgacggcacggccggccggttagctgacgcggcggcaggggcggctggagtcggccgacgctggggagagagaaggaggtggctagagactcgggagggaccaaaacggatcgaggggaggtggaggacttcgttttatagggcaaggagggagtgctggtcacgggagagggcggaaacggcaccggaggaggtggccggcggcatcaatggcggtcaaagaagggggattaaatcccggcgattggggacgggattaaagggggaaagttaggggaactagagaggaagggatgtggattccatttctctaactaatttgaattaatccggcatgaatggagcggatttggggaaggaattggtgcaagggttaacgggagagaggaaagagaggagccggccgggaggtagaagacgaccgggtgggtggaccaaccggtcaggcgcaaggcgcgcacgtgcgccgcgcatgcagaggggcgcgagggagaggagggaggcggcctagggcggcaggtcggctgggccgggatagggcaggggcggcccaagcggaagaggagggaagaggtgggccgggaggaggaggggaggcctgggatagagaggagaggaaaaagagagggagggaagagagacttcggccgtgggccgattgagagaggaaaactttgggccagacttggcccaaagggaaaaggaggattaatttttagtttattttttaataaactttgataattgtttttgttgcttaataattattcccggtgttctgaaaattcaagttaaatttgagggctccttttagaccaaggataatttaacaaaaattctccgggccacattcgaatttttcttgtacgcattttaacgtttgccaaattctattcgaattttaattaattctattattccttttagaaaatgatttttatttcggcatgaatttatcatgggcgtgacattgatgctgatgattggattcgcaccatcgagcggaagctcactctcattcactgccccgacgccgagaagaccaacctggcagccgagcaactccaaggcgcagcaggtgattggtgggagaactttctcgccatgcaacccgccggccgtgtcgtcacttgggctcaatttcgggatgcttttcatgctgcccatgtgccgaagggtattatggacctcaaacaacgtgagttcctatctctcactcaaggcaacaagtccgtcatggagtatctccgcgagttcaaccacttaactcgctatgctccggatgatgtcaataccgacacctgcaagcaaaattggtttatgaatgggttgtcggcggagatgcaactcgagctcgttgcacactcttttctggactttcaggaccttgtcaacaggtccgtggtcattgaaagcaagatgaagaaccttgaagctgagtgcaagcgcaagagggctgcgcagatttcagccgcgggtggttcgcaaaaaccccatggttggcagccgccccctccgcgttttcaagcaccaccacctcctcgtccacaaggattcgtgccatgccctcctcagcagcgtgtcgcgcctcctgtgggcggaaatcagcaagctattcgcccacctgttcgctccaacaactgcttcaattgcgggcaagcgggccactacatcaaccaatgctcgtaccctcatcatgcacaactccaaggaccaagaccagcagcaccatgtcctaatccacctctcaggtcagcacctcagggtcagcaaactcagaagaggggtagagtgaaccatgtcacagccgaggaggcgaacgatgcattggatgttcttgtcggtacgctacttgtccattcatacccagctagtgtgttgtttgattctggagctacacattcttttgtcaccaaaggttttgcatcagaccataaaatcccaattagtatgttgcacccacctttaattgttacatcacccggttcagaaatgagagctgaatttattagtcgggacacaaagatagctatacaaggggtagaatttaccgctgaccttatcatcctccatacaaagggtttaggtgttatcctaggcatggattggctgcacaaaaatcatgggttatcgactgtggccatcgtctcattacactcaaaaataataccggcgaaccgatctttcttgcacttgatgatcattccccacaactccatgctctttcgggcgccaaaaccattgatatagctgctgtaccagtggtgtgtgattaccccgatgtcttcccagaggaattaccaggaatgccgccggatcgggatgttgaatttgtgatagatttgctgcccggaacagctccaatctctaaaagaccgtaccgtatgcctccaaatgagctagaagaattgaaaaagcaactcacggagctgcaagcaaaaggtttcattaagccaagctcctcaccttggggatgtccggctctctttgtaaaaaaggaccttagcttgcggatgtgtgttgattaccgtccgttgaatgaagtcgctgtcaagaacaagtacccattgccccgaattgatgatctctttgaccaactgacaggtgctcatgtgttctccaaaattgatttaaggttgggttaccatcaaatcaaaatcagaccagaagatataccaaaaatagccttctctacccgttttggtctatatgagtacaccgtcatgtcctttggtttgaccaatgcaccggcaaacttcatgagcttgattaattcggttttcatggagtatcttgatcagtttgtggtcatttttattgatgacatcctcatctactccaaatctgaagaagaacatgaaaagaacctctatcttgtattggaaaaattacgtgagcaccgcctatatgccaaatttagcaaatgtgagttttggttgaaagaagttggatttcttggtcatgttttatctgaaggtggagttgctgtagatccaagtaatgttcaaaaggtattagattggggacaacccaaaaatccatccgacatccggagttttcttggtctagctggctactaccgtcggtttattgagaatttctccaaaattgctaagcctatgacccaattattgaagaagaatgagaagtatgtatggtcagctgagtgtgagcaaagttttcaaaccttgaaagaaaagttaaccactgctcccgttcttatcctacccgatatacacaaaagcttcgatatctattgcgatgcctctcgtcaaggactcggttgtgttcttatgcaagaaggccgagttgtggcatatgcatctcgtcaattgagacctcatgaagtgaactatccaacccatgaccttgaattagcctctgttgttcatgcactaaaaatatggcggcactatcttatcggtaaccgttgtgaaatctacaccgaccacaagagtttgaaatatatcttatcccaatcagatctgaacctaaggcaaagaaggtggttagaactcatcaaagactatgacatgggtttacattatcacccgaggaaggctaatgttgttgctgatgcgttgagccgaaaaccgcaatgcaattgcttgtcggtaaaaccccgatcggagaccttatgttcagaaattcataaacttggtttagaaatggtaccacatggttcccttgctgccctagaagtgaaacctactttatatgatcagatcaaagaggcccaaaaagatgacaaaggtatggctcgaatccgagctaaaatggttttaccaagattcggatggtgttttatggttcgggaagcgcttggttgtgcctaaccatcgcaaactgaaacaactaatccttagtgaagcccacaactctcctttctcaatccatcgaggtagtactaagatgtaccaagacctaaagcaaaaattatggtggacccatatgaagcgggaagttgcacggtatgttgccgagtgcgacacttgccgaagggtgaaagccgaacatctaagaccagcgggcactctccaaccactccctattcccatatggaagtgggaagatattggaatggattttatcaccggtctacccacctcctagaaaggcaacgactgcatttgggtaattgtcgaccgactcacaaaatcgactcattttctacccattcattccacatcaaaagttagtaatttggcggagttgtatctcgctcgcattgtatgccttcatggagtgccaacaaaaattatatcggatcgtggaccacaattcacctctcatttttggaagtgtctccacaaagctatgggaaccaaactctcttttagcaccgcataccacccacaaaccggaggccaaactgaaagagtaaatcaaatattggaagatatgttgagggcttgtgtcctcgattatggaataaagtgggaaaaatgcctcccgtatgccgaattctcctacaacaatagctaccaagctagatttcaaatgtctccttttgaagccttgtatggaagaagatgtaggacacctctcaactggtccgagtccggggagaggccattctttggtccagacttagtcaaggaagccgacgaacaagtacggttaattcgggagcgcttgcaaaccgctcaatctagggaaaagagctatgccgaccgtcgtcgacgtgagcttaccttcgatgttggtgactatgtgtacctcaaagtcactccattcaagtccacacaccggtttggagtgaaaggaaaattggcacctcaatccttggcgcgaagcgtcacagtacaccaggaagtccttgcgagtatccggtaagattgacactggtgaggaaaccagcttttctttgagagtttggaacgctttctcgcattgcgggctccacacaaatttttcttccttcttcagtgattggaagcaacccaagacagtcactcaaattcgcagctttttgggtttggccgggtactaccgaagattcatcgagaatttctccaaaattgccagacccatgacgcagttgctttataaaacctttttaactttgtttatttcttaacaattattatttgtgctctgaaaattccactaaaatttatttacgtattttaggcttttaggaaatatacaaaaatcctctaagcatcatttgacttttaactttgcacattttaattgttggaggctttcacatggattttaattattctaggcataatttagaggatatattttagggtcgttttgggacgtgacattgtaacgccccgattttcgattgggattaaaaatcattaaataatgtattttctagaaattaaataaaagttaaatcaatttaatcaagtgaaataataggagaattaaaattttcccttaaaaatcattggccgagaatattttgtaatattctttgtgccctaaaatactctctgaaatttcccacgaattttcggagcccaagaagtaacattatcaatacaaagttcatttaatcaattaaaataaaaagaaaaccaatttaaattcctcttctttcccttgggccggtttcggcccaagtctgctttgcctccccgcggcctgggcgccctccctctctctaaggccggccgccccctcccttctcccctccggcctctggcccagctcgcctccctctcgaagtctattttgcctcccccaaccgacctcctctctctccctctggccgacaggtgggacccgagaccccacctgtcaactcttcctactacctccagccaaccgccatggctgccgttgccgcccacgattgccgccgaatccgcccacctcctccactccgcacgcccgcacccggccgtgggactctgccgccccacgtcctcctcatttccccacctctcccgcaaaatccggctgccacttccccacgtctccaccacctccatccatcggccattgccgcccaaatccaactcaccccggctccatctcaccctcccgagcctatataaaccctccccgtgctcccctcattcgttttccctcctccccagagctttccatcgcctccctcgctctctccgcgtcgctcccgctcgccggcgaccctccagtcgcccgccaccgccgctaaagccacggccgcatgccgccgttggtcccaccggcttcgccacgctatgccgcacctcggcatccacttcattttcctcctccaccgccggaacaaccttcccaccgcgaggccaagccactaccgccactcaccgcctcaagctgcccgctactgccgccctagggacccaaagcactgctccactccatctccctcctccacccctgaagcactgctcccaccgtgaacccgagacgccactgccattagccacctccagctgccgcttgccgccgctccgagccatccccggccatcgcaccttcctcgatcagcttcgcagcgatgaggggaggtccggcgttcgcttctcgtcgtcgggaacccaccggagctccgtcctcctcacgcgccggtaagctccacctctcacctcctcctccggccggcgattcacgccgtctcgggccacctttccccatcctaacctctctaccaccctccctaggtcatcccgcgcctcggccgtccttttcgcaccgccggtcgtcgcccgaggtcgcccccgccgtctcccctagaaggcgtcgccgccgcccgttgcccctcaccgccatggcgctcgatgagctctccctccgtctcccctcctttttcccctcctccgctgcccccttgcccgcgtcgcgctaccgtcgccggaggtcgtccagcgtgtgccgccgccgccttgttgggttggccggcgagccagcctccccttttgtcgatgtgggtcgcgcccgtggaccacacccatggtctcggtccacggtgccgccccggccgcggtggaccgtgtccaccgtgcgccctcccgtagtcccgctgacatgtggggcccgcctgtcggcgcccttccccttgctgacgtcagcgcttatcatttcctttggaaaaatatttaataattgctcaataaattggtattaattatagaaattcattaaaatggctcaaaacttctaaaattcatatctaattcattcgaactccgaattgggccattcaacttgcaaaattcatctaaaattgagctctacatgtttgtttactttttatgtactctttgcttggtgtttattagagttttttttctcgttttgtgtgccagcgagtagattctgttgtttcagaagttcgcagtcacaaggatcagagttcagaagattgttgtgaagaagcaaggcaagtcacacattccccttgagcatgttgatcccaatttataaattttttatcgtttgcaaataaacatgcatgttttgctaattacatgggatcatggttttacctatctgcttggttgtgccatgtttacttgatatctgtcctttgtcaacattgggtaataaatcaactagctcatgttacttatgtgacatagctagaactatatgcttagccatgcttaattaccactagctcagttgatgggatgattgcagtattagacctttttagcaatagaacgagctgcgtgctcgagacacctggccatgtttcagtggtcgtaattatacaactaaaatgcgactgaatagtgggctgtgggtgcatggttttgctagtcgcaccctggaagaatttctcgtacttaccacaagccagcgtgggcaacgactgggcctgtagtgtagctttcctctagctgacgcatccaggcaagggtgggcatgatggagcggggcgggccctgcgacggcctctatcgcttccggattcacctaggcatgacaggggactgcccgttgcccgctggggacgggggtcaaacctgaggtgtggtgtgcttggctagagggggttatgcgaagggtcctgtcacggcctctttccggtatgtcgtggtggcatgtcggcgcatggaaacgtgtgatgtggctgtgtcttgtggttacagttgtacacctctgatcagagtaaaactattcgaatagtcgtgcccgcggttatgggcggtcgaccagattcaccgtgattagtctcacacttaataaatcgacgcaatgcactgtagttcaggtgggttggttgggcctgttcaacgtggtgtagcgttgatcagtggagatttaatgttactttaattacttaactgttttactgttttgtccaataaaatgctttacaaccgcctttatgcaaatagccacaaaccgtccttgtgttccccttgcacgtctgcatcgttggtgtggcttgctgagtacggtggttgtaatcagccttgctattattcccccttttcagaagtgtagtgcttctgagctgaagacgaggttagaataccaaggctcagacccctggtgagttttacctgtggagtggagctgaagccccgcaaggatcgccttttctgctgctgctgcttttatttcggtgtgaggactaagtgcctcttctgtaagtaatttatgctttatttacgtttggaactgtttattacttgtcgttttgtgtaccctggctggtcttggacagggatttaatacacaaaatagtctggaaatttggactaaatttctaggcgtgacaaacacctctggtgctgaaagggttgagacggtcccttcggccagccctcatcgggaagggaaggcccagcggttgagttgacagtgtctgacatgacacttacctccccgcactttgtctctgtggagtttgccacatggccagagaattcccccttcatcgatgggctgtgccagattgttgcgccgtcttttcactgagctcaacgagtttggtgaaagctgcgcagccgcggaaagcttgttcgtgcgggtgaggacttctctttttttttctttcgcctatctagctttttgtcctttttgctattgttgtgctaagagggctttggtttccttaacttagggtctcgcagcgcacttgagtgcgaagcggtccaccttggagtgactggacgagtaccatctcagccttcggaaggccgaggaggatcttcgccataaggaggatgagcgtcgggtcgtggcggacgccataaagaaatctagcgtcgagaacaagtccctcacgggggaaaacaagtctctccgcgtcgacctggacggagcgaacaagagggccgccgaacgggagcgccagctcgctgcggctttggaaaagattaaatcccttgaaacacagcttgtctcagccgaagctgctaccaaggcttgggcgccgccggcgacggagtcagccaagcaagcctgctacacccttaggctggctctcaacgaccttggtgcgcatgcgtagggcgctccgggtgacgacgagacgacattcgatttttctgagtggacgcaagatgcggccgactcagttgtcgaagtggctggcacgtacggcgattgctgtgcgcgagttgccgcaggcttcgtgcttagcctccttcacgaacatggttgtgaccatgttgaggattttcctcagatcgtaaagaagggctggcccgaaaatgaccaatctgccgcgtcggccgtgaagacctttcggaagagcttctgggagaatggcggcaaggatggcgcgaagacccagctccgcgaccagctggagaggatagcgagggccgaagacgccgctgccgccgatgctagtgaagatcccgagccgtcgggggcgcctgctggccgtgagggcgaaggcaacaaaagccaagaccaccctgaggtgtgaggcccttcgccccgcgttttttgctttttaagaccttaatggccgtggtttgctcgcatgtacatatatataggtgctttacgtgtttggctgggtgccgttatcatcttgtagccttcatggctttaagtttattaattaaaaattagtgtttcgccaatcgtatgtttttgctggaatgtgggattgattttgctagcatttctcccttgtgcactgttcctttgtgccttgcttgcagggttgtagctgaaaaatgtgcattcggcctccctccggggattggcgaaataagaacgagaagttcgtggcggtgaagggcttgccaaagaccaagtgtccttttcggcccgtttaccgcgagatgttaataaacggcaatagctacatggttataaaggttgcaggatggatgtgcgcacacccagcccgaactttagaggactatgaccgttatcatgtggcgtaccgcgaagatagcacaaatttttggcgaaactttaagaggtcgattcgccaagaggcgatcgcccgtcgccgttacagtttagtttgtgtttggcccccgttccttttaagggttgtgtacaatgttggtagtgatgacgaacctagttcgccggcttgtaacgtaaacgagggcggatgtgtaactgatggtataatctttctaatgaggttcgcttacgtaaatacaacagatttgttgtaattttgtttacttgatactttgtgaattcttgaacatatctttattctatcgttcgcatagtcactgtcgtgctttcgttaggtcgaaacgtgtcgacccctctgcgtactatggcaaaaagatatgtttatttctcatctctgctcttctgttttcggcttgtggcaggcgtgctaccaagcatcgtggcctgtgcgtaagctgagtacaaccgcgttttgacttgcattttcaaaattcgagctgtgacggtttcgacgttcggtgagctatgcttcgaccgattcgtttcgcccccctggcgcgttagctgatcaggagtttgccttgggatttttccacaaagacatcattcacagaaaaagaaaagcggaaaaacacaaagattttatactgtttcgggcctccaaggtggataataaccctacgcccaacttttttttcttttttcattttcctcttttttttttgctttttgtgccgaacggcttacataatacgaacatatttacaattggcgaatcgggtgccacccatattacacatagaagcgtctaagtgaagcgacgttctaggagtggtcgaactcttcgccctccaatgttgccagccgaaaagaacctgttcgagatctctgctttatcagatatggtccttcccacttagattccagcttcccgactgccatagggttcgccttctttgttagtacgagatggccgggccgaagctctgtcggtcgaacctttctgttataggttgccgaagtgccttccgcgtacttgcgcatgtgttctagtgcttcgactctcaccactttcacgagttcgagcgacacttcacgcccatttcgccaccagaaaacatcacccatggtgagttagtccctagttctgccggcgtcatcgccccatgcttcaattgcagatgtgcgacggaggcgaacttgatttgcaaatttagctcctcgcacatttctttgaatttttcagagtcgaactgcttgccgttgtcggtaatgaactccttcagtaccatgatatttttccaaacaaacttctgaatggctgctgcagttattgtgccaagtggttcggcctcaatccagcgagagaaacattcgatggctacaatggcgaacttgtaaccatttcgcgccaccgggaatgggccaatgatgtctaagccccatcttgcgaatggccaaattggtgcgattggctatagttcgtattgtggtgctatttggcttcgaccatgtcgctgacagctttcgcattttttgacctgttgaacacatacttttagtatggttggccaatatatgtcctggcgaaatacttctgatgtgacggttcttgctacttggtgtgctccgcacatcccttggtgtatttcttttaccatctcttctccttcggagaaggagacacagcgaagcatgggctgcaatattctggttcggtacagttgcctagagattaacttgtgcttcccggctctaagctgcagctacctcgacgttgcttcttcatccggtagccatccctctttgaggtgcttgacaaaagacgttcaccagtcgtctgggtcttcgccagttcagcttggtcaattaccatgatgtctgggctgtcttctggcacacttggtgtatacaaggcttcgaaaaggactcctggcgaaaaagcttggtcaattaccatgatgtttggtctgctgattttgctaacgcgtcagcttactcgttctggcctcggggcaagtgttcgaccattatgccggcgaaacttttgtccatagaccgaacggcctccaggtactttctcatcccttctttcgcgtcaaaagatttgtcaacttggctggcgacaagctttgagtccgtccggactagcgaacgccgaacaaccaaagctttcgctttccttaggcccattaacattgcttcatattctattgtgttgttggttgtgccgaactctagtcttactgcgtaacgaattggaatgcccccaggcgaagtcaggattgcagtgatgcccgcctccttgtgagaccacgaaccatcggagtgcatgacccatggttgtttgaccggttcgggctctgggacggacgcgagtgtccattcgggcatgaagtcagcgaggacttgggacttgatcgtggtgcgggcgacaaagtgtaggtcgaaaggtgacagcttagcggcccacttcgtccaaaggatactgcgaaggtaccacgattttgtgggcttggaaatagtgtttgagctttcttgaagccatcacgagggaataatcaagtttttccatttcaatgtatctaaccttcgcctcctggagagcttcggagacaaagtacactggcttctggcctgcttcggtttcttgtaccaaagctgcgctgacagcaatgggcgaagccggtagatagagccagagttcgttccctgccactgggctaactagagttggagggctttggagataccgcttaagctcatcgaaagctatttggcactcgggcgtccaacagaactttcctgcccctcgaagggtcttgaaaaaaggtaagcccctttcagccgcttttgacaggaatcgactaagtgccacaattcgccccgcgagcttttgtacttgtcgtacgctcgatggtggcttcatttgctgaatggcatcgattttctcggggatcgcttcgatcccccgttcggacacaaggaatcccaacaacttaccagcacgaacaccgaacacacatttctctagatttagtttcatgccagctgcgcggaggttgttgaatgtctcttgcaaatctgatgtgtggtcgaagcccttgctgcttttcatgacaatgacatcaacataggcttcgacatttcgccccaactgcgaccccaagactttgtacactagcctggcgaatgtagcccctgcattcctcagaccaaaaggcattcttagatggcagaaggtgccgaagggcgtgatgaaggctgtcttggggatgtctgccgggttcatgtaaatttggtgatatccggagtatgcatccaagaagctcatgagttcgcatcggcggtcgaatcgaccagctgatcgatccggggcaatgggaaatcatccttcgggcacatcttgttgaggtccgtgaagtcgacacacattcgccacttgccgttcgacttcttcaccagtaccggatttgctaaccactctgggtggtcactctcttgtatgaccccagctttcagcagcttgttcacctctgctttcgccgcctcttggcgatctgccgacattttcctcaacttttgcttcgtcggctttgcttcaagcttgactgtgagatggtgcatgataagatctggcgaaacaccccctacattgtctggcccccaagcgaagatatcaatgttcttcttaagtacaaccaggatgctgacaacctcttgttcgctcaggtctccaccaagcgatatgactttggcggggtcgaattcatctatatgccactggataaccttgccgtgggggcaggctttggtattggctttgttttttcttgtccttcgacctctagggtgtggacttccttgccgaaaggggtcctgtgacggccgaaggctgggaacccttgacagctatcacaccggctgggccaggcatcttgagcttgaggtagttgtgatgagagactgcttcgaacttggtcaaagtgcccctgctgaagattgcgttgtagttgtaggggatgttgacaatgtcgaagagtatctcttcttctcttttgttctcttgcgaggctgaaggctcggaggccgaaggctctgctccctcttcggctaccatctccccttcgcttccatcttccatccgcttgacaactctctccttgacgatcttcttcggtgacatcagtggtttcgctcggaggtccccacggtcagcgccagctgttgtcgaatagacaactgtgtcacgccgaaaggcgtggttctctcaacagtggttggaagtgaaaaacaattgtattgcttagtgaaaattgttttggatccccgtattacaagacactagagggctatttatagccctattataggttcccccgtttagggtttaggttttacaggggaatttatatggttacccttatgatagggacattattgatggcacactatgtcctttacatgtatgggcccttattgggctaaatggctcggcccaaccacttagcgaaaccttccttggcatggcggcccgttggtgtcgcgaccgagaaaattgccttttcccgaacgctagtgtattaatccccgtcccaggaaaagccggggtacaccaaacaaatatgatataaaattgcctttatgagtcggttaccaatctccataatgggagattacacaattcaaacaattaggaattcaactcaaagtaaaatagacgaagaaaaatcttggaattcaagaacaattactgattactagaatttttttgttagaatccaaaagttctttactaactagaaagaaaaacgaatacctactgcttattgcaaattattcctgattttaaaccagagtagattttcgtgatgtgatttctaactatagaaagaacttatatacaatatacaaaaaaatttcctaatcccttttttcttccttgaatcttttagttttagttagttcatgaaaaaatttatactattaatttcttcttatccataatggatttacctgggccaatacatgaaattcttgtgctatttgggggatttgttcttctactagggggtctaggggtggtattacttaccaacccaactttttctgctttttcgctaggattagttcttgtttgtatatccttattctatattttattgaattcctactttgtagctgtggcacaacttcttatttatgtgggagctataaatgtcttgatcatatttgccgtaatgttcgtaaatggctcagaatggtctaaagataagaatttttggactattggagatgggttcacttcactcgtttgtataactattcctttttcactaatgactactatcccagatacgtcatggtatggaattctttggactacaagatcaaaccaaatagtagaacagggtctcataaataacgttcaacaaattgggattcatttagcaaccgatttttatcttccatttgaactcatttccataattcttctagtttctttaataggtgcaattactatggctcggcaataagaaatacttagaatgagtcaaaattctaagaatttcaaatctaaaataaatcactaaagaaccacaattttgatttagtaaaacccatctactgccaacaaataccttcttttctcttttgttgtgtaattgttctattctaattaattcaatcggttcaattcttgtccccatattgaaatgaatcgagattgataaggagttagttaatgatgtttgagcatgtactttttttgagtgtctatttattttcgattggtatctatggattgatcacaagccgaaacatggttagagctctaatatgccttgaacttatactgaattcaattaatctaaatctcgtaacattttctgatctatttgatagccgccaattaaaaggaggcattttcgcaatttttgttatagcccttgcggctgctgaagcagctattggattatccattctttcttccatccatcgtaataggaactacccgtaataacgagcttgcaaaatggatctgtttatcataaagagattcgttgttcctgaccctgcttcaccttaattgttatttgaacaaaaagatcacaataaacttttggtaaaagttctgtcttggtcggagtggggatagcatttctcttctgcatatctatggagttttgcaaaacccaaacacctcagagatagatatagaggtaggaatttgtcgaacgaaccacactccttcgtagacgtcaggagtccattgatgaaaaggggctggggaaagcttgaacccaagtcctacagtgatggatataagcgcaattgaaattcctggggagttatacatttgtgtattgataagaccgttcacaatttcttgaagctcgatctcccccccagatgaaccatatagccaagagaaaccatgaaccagaatagaagagcttgccccacccatgagtaaatatttcatagtagcctcattagaccgtagatctctcttggtatatccagacaataggtaggaacataaactgaaacattctggagctacaaagatagttattaaatcgttagcaccacataaaaacattccccctagagtagctgttaatacgaataacagaaactctgttatagccatttctgtacattcaatgtactctacggatagaggaatacataaagttgaacataataaaataagaaattgaaagatttcgttgaaattgttcgtttggaaatttcccgaaaagctaattataggttcttctctccatcggaacaatagggccgttatgcttattactaaacttgttgaagagatgaaataaaaccaaggtctatctttttgatcagaggttaaatcgatcatcagaagaagaattaggccaaaaattaggatacattctgggaaaatgaaacttccctggaagagaagcaaatgaaacgctttcataaaaattctcgtagaatcgagaatgaagttttcattctgtacatgccagatcatgaattagtaactgcatccaatctccgaaaagtcccgattgtttcgatttttggaatgggatatttacggaatccccatgaataggatcaaaccttattccatgctatttccataagattcctctttcttattcttaagcaagcccccgagagggcttagttgatcatgatttctgttttctctttcttttcctttttgtttgtttcgagaaagatatcgtccgattctccttctattgattcttttccgatcgagatgtatggatccatgtgtctacatacctagattctgttcatggattaacgaaaatgtgcaagagctctatttgcctctgccattctgtgagtcgcttcctttttgcgtatggcacccccacccccattggcagcatctactaattcggaacttaatttgaaagccatatttcgacccggacgcttttgggatgcttctaataaccaacgaatggcaagtgctcttccttgtttagatcctatttcaatcggaactttccgcgtcgatccttttttattacgtcttgtttttactcctatattgggagttactctacgtattgcttgacgtaaaaccaatagtggatttgtttctgtcttttgttgaatctttttcacggctcgatagagaatttgataagccaatgatttttttccgtctttcataatacggttaaccaccatgttaactaatcgattacgaaaaattggatcagattttgcagttcttttttctgcagtacctcgacgtgacatgagcgtgaaagaggttcaagaatccgttttctttttataagggctaaaaacgaatcacttatttttttggctttttgaccccatattgtagggtggatctcgaaagataggaaagatctccctccaagccgtacatacaactttcatcgaatacggctttccacagaattctatagggatctatgagatcgagtatggaattcagtttactcacttaaaattgagtatccgtttccctccttttcccgctaggatcggaaatcctgtattttccatatccataccatcaagtccttaggtttccgaaatagtgtaatggaaaaagaagtgcttcgaatcattgctatttgactcggacctgttctgaaaaagtcgaggtatttcgaattgtttgttgacacggacaaagtaagggaaaacccctgaaagaatttccatattgaccttggacatataagagttccgaatcgaatctctttagaaagaagatcttttgtctcatggtagcctgctccagtccccttacgaaactttcgttattgggttagccatacacttcacatgtttctagcaattcacatggcatcatcaaatgatacaagtcttggataagaatctacaacgcactagaacgcccttgttgacgattctttactgcgacagcatctagggctcctcgaataatgcgatatctcacaccgggtaaatccttaacccttcctcctcttactaatactacagaatgttcttgtaaattatggccaataccaggtatataagtagtgatttgaaatccagaagttaatcgtactctggcaactttacgtaaggcagagttgggttttttggggttgatagtggaaaagtcgacagataagtcacccttcctgtccctctacagaaccgtacatgagattttcacctcatacggctcctcgttcaattctttcgaagggatccttttcctcgttcgagagtctccgcccttcttccactccatcccgaagactaactaagaccaattgagtcacgttttcatgttctaattgaacactttccatttatgattaaaggagaagattgttcttttaccaaacatatgcggatcaaatcacgtcttataataagaagaaatctttctcggtatcaatccccttgcccctcattctttgagaatcagaaggatccttttcgagtttccatttcttcatttggaatctgggctcttctatcttcgacttatttttttttgctttattctttatttatttcatttcgatttttccctcttcctctatccctatcctctaggtacagcgtttgcatcaatagagaaccttttcctctgtatgaatctatattattccattccaatttcttcccgaaacttcccaagaaaaatcccgaattggatccaaaattgacgggttaatgtgagcttatccatgcggttaggcactcttcaaataggaatccattttctaactggctttcgtgctttggtgagtcgtccgagatcctttcgatgacctatgttgtgttgaagggatatctatatgatccgatcgattgcataagacccgcggtagcaatagaacggggaaagtatatagaaaagacagttcttttcaatttcgattatctatatattagtttgtttctatttctagatatctatttctatatattagtattagttagtagtactattctattagttagcgaacccggctctgtgagttctttcttccgtgatgaactgtcggcaccagtcctccattttttctctgtggaccgaggagaaagggggctcagcaggaagaggattgtaccatgagagaagcacagaggtcaaccctcttcaaatatggaacatggattctggcaatgcaacgtagttgggtcctcatatcgatccgaatgaatcagtctttctacagaggtcaatctttgcctattaggcaagaggatagcaagtttgaaattctgtctcggtaggacatggatttctattactatgaaattcataaatgaaaatgaagtagttaatgggagggctaccattatcctttttcttgtatgtgttcctaagagaaggaatttgtccatttcatgtttcgaggtctcaaaaaagggcgtggaaacagatagaaactcttgaatggaaattgaaaagaaatgtagccccagttccttcggaaatggtaagatctttggcgcaagaagaaggggcgacccatatcatcttgacttggttctgcttcccctctttttttaagaataccgagtcgggttcttctcctaccagtatcgaatagaacatgctgaacaagatcttcttcatggaaacctgctcgatttagatcgggaaaatcgtacagattttatgaaaccatgtgctatggctcgaatccatagtcaatcctattttcgataggaccggttgacaattgaatccaattttttccattatttgactatccataatagtgtggaaagaaagcccggaggaagggtggccttgagtttctcgcccctttgccttaggattcgttaattctctttctcgaggggacggggaagggatataactcagcggtagagtgtcaccttgacgtggtggaagtcatcagttcgagcctgattatccctaaacccaatgtgagttttttctattttgacttactccccccgccacgatcgaacgggaatggataagaggcttgtgggattgacgtgatagggtagggttggctatactgctggtggcgaactccaggctaataatctaaagcgcatggatacaagttatccttggaaggaaagacaattccgaatccgctttgtctacgaataaggaagctataagtaatgcaactatgaatctcatggagagttcgatcctggctcaggatgaacgctggcggcatgcttaacacatgcaagtcgaacgggaagtggtgtttccagtggcgaacgggtgagtaacgcgtaagaacttgcccttgggaggggaacaacaactggaaacggttgctaataccccgtaggctgaggagcaaaaggagaaatccgcccaaggaggggctcgcgtctgattagctagttggtgaggcaatagcttaccaaggcgatgatcagtagctggtccgagaggatgatcagccacactgggactgagacacggcccagactcctacgggaggcagcagtggggaattttccgcaatgggcgaaagcctgacggagcaatgccgcgtggaggtggaaggcccacgggtcgtcaacttcttttctcggagaagaaacaatgacggtatctgaggaataagcatcggctaactctgtgccagcagccgcggtaagacagaggatgcaagcgttatccggaatgattgggcgtaaagcgtctgtaggtggcttttcaagtccgccgtcaaatcccagggctcaaccctggacaggcggtggaaactaccaagctggagtacggtaggggcagagggaatttccggtggagcggtgaaatgcattgagatcggaaagaacaccaacggcgaaagcactctgctgggccgacactgacactgagagacgaaagctaggggagcaaatgggattagagaccccagtagtcctagccgtaaacgatggatactaggtgttgtgcgactcgacccgtgcagtgctgtagctaacacgttaagtatcccgcctggggagtacgttcgcaagaatgaaacttaaaggaattgacgggggcccgcacaagcggtggagcatgtggtttaattcgatgcaaagcgaagaaccttaccagggcttgacatgccgcgaatcctcttgaaagagaggggtgccctcgggaacgcggacacaggtggtgcatggctgtcgtcagctcgtgccgtaaggtgttgggttaagtctcgcaacgagcgcaaccctcgtgtttagttgccactatgagtttggaaccctgaacagaccgccggtgttaagccggaggaaggagaggatgaggccaagtcatcatgccccttatgccctgggcaacacacgtgctacaatgggcgggacaaagggtcgcgatctcgcgagggtgagctaactccaaaaacccgtcctcagttcggattgcaggctgcaactcgcctgcatgaagcaggaatcgctagtaatcgccggtcagccatacggcggtgaatccgttcccgggccttgtacacaccgcccgtcacactataggagctggccatgtttgaagtcattacccttaaccgtaaggagggggatgcctaaggctaggcttgcgactggagtgaagtcgtaacaaggtagccgtactggaaggtgcggctggatcacctccttttcagggagagctaatgcttatgcttattgggtattttggtttgacactgcttcacgcccaaaaagaaggcagctacgtctgagctaaacttggatatggaagtcttctttcgtttagggtgaagtaagaccaagctcatgagcttattatcctaggtcggaacaaattagttgatagtgataggatcccctttttgacgtccccatgccccccctgtgtggtgtggcggcatggggatgtcaaaaggaaagggatggagtttttctcgcttttggcgtagcaggcctcccaaagggaggcccgcgcgacgggctattagctcagtggtagagcgcgcccctgataattgcgtcgttgtgcctgggctgtgagggctctcagccaaatggatagttcaatgtgctcatcagcgcctgacccgaagatgtggatcatccaaggcacattagcatggcgtactcctcctgtttgaatcggagtttgaaaccaaacaaacttctcctcaggaggatagatggggcgattcaggtgagatcccatgtagatctaactttctattcactcgtgggatccgggcggtccgggggggggggcactacggctcctctcttctcgagaatccatacatcccttatcagtgtatggagagctatctctcgagcacaggttgaggttcgtcctcaatgggaaaatggagcacctaacaacgcatcttcacagaccaagaactacgagatcaccctttcattctggggtgacggagggatcgtaccattcgagcctttttttcatgtttttcccggcggtctggagaaagcagcaatcaataggacttccctaatcctcccttcctgaaaggaagaacgtgaaattctttttcctttccgcagggaccaggaggttggatctagccataagaggaatgcttggtataaataagccacttcttggtcttcgactccctaagtcactacgagcgccctcgatcagtgcaatgggatgtggctatttatctatctcttgactcgaaatgggagcagagcaggtttgaaaaaggatcttagagtgtctagggttgggccaggagggtctcttaacgccttcctttttctgcccatcggagttatttcccaaggacttgccatggtaagggggagaaggggaagaagcacacttgaagagcgcagtacaacggagagttgtatgctgcgttcgggaaggatgaatcgctcccgaaaaggagtctattgattctctctcaattggttggatcgtagtggcgatgatttacttcacgggcgaggtctctggttcaagtccaggatggcccagctgcgccagggaaaagaatagaagaagcatctgactctttcatgcatactccacttggctcggggggatatagctcagttggtagagctccgctcttgcaattgggtcgttgcgattacgggttggctgtctaattgtctaggcggtaatggtagtatcttgtacctgaaccggtggctcactttttctaagtaatggggaagaggactgaaacatgccactgaaagactctactgagacaaaaagatgggctgtcaaaaaggtagaggaggtaggatgggcagttggtcagatctagtatggatcgtacatggacgatagttggagtcggcggctctcctaggcttccctcatctgggatccctggggaagaggatcaagttggcccttgcgaatagcttgatgcactatctcccttcaaccctttgagcgaaatgtggcaaaaggaaggaaaatccatggaccgaccccattatctccaccccgtaggaactacgagatcaccccaaggacgccttcggcgtccaggggtcacggaccgaccatagaccctgttcaataagtggaacacattagccgtccgctctccggttgggcagtaagggtcggagaagggcaatcactcgttcttaaaaccagcattcttaagtttaagatcaaagagtcgggcggaaaaaggggagagctccccgttcctggttctcctgtagctggattccccggaaccacaagaatccttagaatgggattccaactcagcaccttttgttttgagattttgagaagagttgctctttggagagcacagtacgatgaaagttgtaagctgtgttcgggggggagttattgtctatcgttggcctctatggtagaacccgtcggggaggcctgagaggcggtggtttaccctgtggcggatgtcagcggttcgagtccgcttatctccagcccgtgaacttagcagatactatgatagcaccgaattttgccaattcggcagttcgatctatgatttcgcattcatggacgttcataagatccttccatttagtagcaccttagagtacattgaatgtacagaaatggctataacagagtttctgttattcgtattaacagctactctagggggaatgtttttatgtggtgctaacgatttaataactatctttgtagctccagaatgtttcagtttatgttcctacctattgtctggatataccaagagagatctacggtctaatgaggctactatgaaatatttactcatgggtggggcaagctcttctattctggttcatggtttctcttggctatatggttcatctgggggggagatcgagcttcaagaaattgtgaacggtcttatcaatacacaaatgtataactccccaggaatttcaattgcgcttatatccatcactgtaggacttgggttcaagctttccccagccccttttcatcaatggactcctgacgtctacgaaggagtgtggttcgttcgacaaattcctacctctatatctatctctgaggtgtttgggttttgcaaaactccatagatatgcagaagagaaatgctatccccactccgaccaagacagaacttttaccaaaagtttattgtgatctttttgttcaaataacaattaaggtgaagcagggtcaggaacaacgaatctctttatgataaacagatccattttgcaagctcgttattacgggtagttcctattacgatggatggaagaaagaatggataatccaatagctgcttcagcagccgcaagggctataacaaaaattgcgaaaatgcctccttttaattggcggctatcaaatagatcagaaaatgttacgagatttagattaattgaattcagtataagttcaaggcatattagagctctaaccatgtttcggcttgtgatcaatccatagataccaatcgaaaataaatagacactcaaaaaaagtacatgctcaaacatcattaactaactccttatcaatctcgattcatttcaatatggggacaagaattgaaccgattgaattaattagaatagaacaattacacaacaaaagagaaaagaaggtatttgttggcagtagatgggttttactaaatcaaaattgtggttctttagtgatttattttagatttgaaattcttagaattttgactcattctaagtatttcttattgccgagccatagtaattgcacctattaaagaaactagaagaattatggaaatgagttcaaatggaagataaaaatcggttgctaaatgaatcccaatttgttgaacgttatttatgagaccctgttctactatttggtttgatcttgtagtccaaagaattccataccatgacgtatctgggatagtagtcattagtgaaaaaggaatagttatacaaacgagtgaagtgaacccatctccaatagtccaaaaattcttatctttagaccattctgagccatttacgaacattacggcaaatatgatcaagacatttatagctcccacataaataagaagttgtgccacagctacaaagtaggaattcaataaaatatagaataaggatatacaaacaagaactaatcctagcgaaaaagcagaaaaagttgggttggtaagtaataccacccctagaccccctagtagaagaacaaatcccccaaatagcacaagaatttcatgtattggcccaggtaaatccattatggataagaagaaattaatagtataaattttttcatgaactgactaaaactaaaagattcaaggaagaaaaaagggattaggaaatttttttgtatattgtatataagttctttctatagttagaaatcacatcacgaaaatctactctggtttaaaatcaggaataatttgcaataagcagtaggtattcgtttttctttctagttagtaaagaacttttggattctaacaaaaaaattctagtaatcagtaatcgttcttgaattccaagatttttcttcgtctattttactttgagttgaattcctaattgtttgaattgtgtaatctcccattatggagattggtaaccgactcaaagaaatttgattgtaattcaattcatgacgatcataagtagaaagttcatattcttcagtcattgataaacagtttgtcggacagtactcaacacaattaccacaaaatatacaaactccgaaatcaatactataattaagcaattgtttccttttaatatccttttcaaatctccaatccacaagaggtagatctatagggcatacgcgaacacatacttcacaagcaatacatttatcaaattcaaagtggattcgcccccggaaacgctccgatgtaattgatttttcataggggtagtgaatcgttataggtaaacgatttgtgtgggataaggtaattatgaaactttgaccaatgtaccttgctgcgcgtattgtttgttgaccataactcatgaacccagttaccatagggaacatattcgaaatatctatgaaaaaggtatgtttctttctcttgtttgagaggacttttgtgttgaaaatattcttactgttattgtattatcttattttatagtgaaacaagttgggaagaagttgttaataagagattgcccagggaaataggtaaaagaaatttccatccaagatttaataactgatccattctcatcctgggtaaagtccatcttattgtgatagaaatgaagagaaataaataagctttagttaatgtaataaagatactcattgtcatttctaaaattccaaccattttattcatttggaaaaatccaaaaaaggatatatagggaatagacaaattccacccgcctaagtagagaactgttacaaataaagaggaaactaataaatttaggtacgaaacaagataaaataaaccatatttgataccagaatattcggttttataacctgctactaattcttcctccgcttctggtaaatcaaagggtaatctttcacattccgccaaagaagaaattagaaaaaccagaaaacctataggctgacgccaaagattccatccaaaaaaaccatattttgactgtgcttcaactatatcaactgtacttgaactgttggataatcatagtcgacgataacattacagttcccaccgctattccaaaaccgtacatgaaaccttagtttcatacggctcctctatgatgagaaaaaaggaaagtactgtttcatttcgttattatcttcttgggcgtagttggaattatctaagataaaatcgatttcaacgtcctaaattagaccaaaggaattctgtctgctagaataataaaaaacgcttcggaattcatctcatcctttataatataatggtactttttctttgttcagcaataacttaatcttggaataaaacactcgttataacaattaataaacgaaaagagttgggtattagttcatgaagaattctgtatgaatatggataaacgacggaaagaataaataaagatcttttttttgtattgcattccatatcttttgtcctattcttctttccccgaggggtatttaaaaagaaaaaaggaataaagggttaattcgttcttgatagccatttccttaacaagtgaatgggaacatactctggatcggaatccgaagaaagtactacttgctcatttccaccaatttcaagtccttattatgattccttttatgaggaaaaatatctaatgctttagattccctcattactaatcctttatgtactttagtgtttctaatccctcactaacttttgatggattcccttatgattacaactttctgtatcgggaatcccttattattgcccgcttcaagatatgatgactaatcaaaaaatctcaaccttggggtaaagaatttacaccgcttatgtttacttccattttttcttgtacataggaaatgagattttttctttttactacaaattaataagcagttttgtttcactcatatagctatctagtttaacttactaacctgaatatagaataagaaaaggaggataaatattcaatgaatttcagaggaaaaagatcctattttaacgaatcgcacgtagagatattgctagtacacaaaaagttaatgggatttcataactaatagattgagcggcagctcgtagaccacctgaaaaagaatatttattatttgagctatatcctgccataagaagaccaataggagcaatacttgaaatggcaatccataaaaaaacaccaatactaagatccgctaaaacaaagcgatatcccaaaggaataactaaaaaacttaataaaattgatatgactgctatagacggtccaatgctaaataagggaatatcccctcgggatggcaagatatcctctttaaaaagtagcttagttccatctgctatagcttgaagcagtcccagggggccagcatattcaggaccaatacgttgttgtatcgatgcggatatttctctttctaaccacacaattacgagtacttctattgtgattccaagtaagagggtcaaaatgggtagaatccatatcagtccatagacttcttttaataattccaagtttgaaaaagaattgatagcttctacctgtaccctgtctattatcatttcaacgatcaacttctcccataatgatatctatactacctaatatcgtcatgatatcagccaatttcatttttttgactagctgaggaagaatttgcaaattaataaaaccgggtggacgaattttccatctccaggggaaatgactatcatctcctaccagataaattcctaattcaccttttggggcttccactcttgcataaagctcttgttttgacaattcaaaattgggtgaaggttttttaccaagaaatcgatattcaaaatcattccattcggaattctttgctttcttaaagcgtcggacttctaaattctcataagggcccccaggaattttttctacagcctgttgaataattttgattgattccctcatttcaccgattcgtactaaatagcgtgctaatgaatccccttctttttgccattggactttccaatcgaattgattgtaagactcgtaaagatcaactttacgaagatcccattgtattccagaagctcgtaacatggggcccgataagccccaatttacagcttcttctccgctaataaaaccaactccctcaactcgttccaaaaaaatgggattctgtgtaataagttgttgatattcaataactcctcgtaaaaaataatcacagaaatctaaacatttatcgatccatccataaggcagatcggcagcaactcctccgatgcgaaagtaattatgcatcattcgcatacctgtagcagcttcaaatagatcatatattaattctctctctctaaaaatataaaaataaggagtctgcgcaccgagatctgccataaaaggtccaagccataacaagtgagaagctatacggctcaattctaacataattaccctaatatagctggctctttggggtatttgaatattctccaagaattctggtgcatttaccgttattgcttctgtaaacatagtagctaaataatcccaacgtgttacataaggtaagtattgtataatagttcggttttccgcgattttttccattcctctgtgtaaatagcctaaagaacgaataaaaccccttgtcgaagccctttatgataagcttccctggatctgggaagtttctctttcacggtattgggatcgtttgatcgatttccttgatcgctacttatgggcgtgcgctcaaaggatacaaacagggattcgcaaagaaaaaggggaattcgtagtcactttttcctgtcgcgtaaaaaaaaggctttacgcgagagcaatagaggttgggatacatctatctcttctgagcaacctcttttggattcttaagaccacccttgcagtaggataccgtctgctttgggttctttattatattatctccttcgagggatttttaggatcgttcaggctatatttagtctattttggcttttactgtctccttttctcagggaagtggttaaggacctcagaagatagaggagagcgccaggcgcagatttccggaatacttctacggggaatgctcattgaatgcgcattctccgtattatgccttgaagaggactcgaacctccacgctctttagcacgagattttgagtctcgcgtgtctaccatttcaccatcaaggcatcttgaaagtgaatcatattccatgaatatgatatctatctaatgtgatatcttgaaagtgaatcgtattccatgaatatgatatctatctaatgtgatatatggaatatatgacaaaggtggagtcttggagtatttcgatcgatcggtcatataggcctgagtcagacatcaaatagcttcgatttgcattatccgtagcacaccttatatgtatcaaaatcaaaaagatgtacaatccaatttctcgattcaatagaagcccaaagaggtgcatatggtacccaaataaggataggatagatatgtcaaaagcaggtctgattacacctattcctaatcctaaatagaatgtaaggacgtggggatttctatgtaaacagagtatcctatttccataggctcgaaagaccccttctcataataagaatgtgcacggtctggtccggtatggaatgaacttataatctgatgatcgagtcgattccatgattataagttcattaccctagcgcccattcccattttgggcggaacagatctactaattcttttattccagttagtaagagggatcttgaactaagaaatagacctagcagctaaaagagggtatcctgagcaattgcaagaatggggttcattgatattcctggtatagtagatgctatcacacatacagtcatactcaattcgatggaattgtttgatcttaaaggggatcttctataatttcgcacataaggggttatttcttggtttcgtccagtcattaataacttgactatttttagataatagtagatagaaagaacgctcgtaaggagtcctattgaaaccaagaaatataggcctgcttgccatccacaccagaatagatagagttttccgaagaaacctgctagtggaggaaggcctcctagggataagagacatagggctaaagagagagccaaaaaaggatctttcgtgtataatcatgcataatctcgaatgttatcagttccggtacgtagaccaaataatacaatgcaagcaaaagttcctagattcatggagatatagaaaagcatataagttatcatgcttgcatatccatcatttgagtctccaacaattattccaataattacatatccgatttgccctatggacgaatatgcaagcatacgtttcatgcttgtttgagtaatagcaaggagattccccaatatcatgctaagaatagctaggatttccagaagaagatgccattcgtttgatgagaaataaaaaggaatatcgagaattcgcgtggctgaagctgaagcagcaactttcgaagtaacagaaagaaaagcagcgactggagtgggggagtcagagtcgaaaagaggattcctcgcttctttctctcatgcaaaaccgtgcatgagactttcatctcgcacggctcctaagtgataaattctcgcgtctgattagctagttggtgaggcaatagcttaccaaggtgatgatcagtagctggtccgagaggatgatcagccacactgggactgagacacggcccagactcctacgggaggcagcagtggggaattttccgcaatgggcgaaagcctgacggagcaatgccgcgtggaggtggaaggcccacgggtcgtcaacttcttttctcggagaagaaacaatgacggtatctgaggaataagcatcggctaactctgtgccagcagccgcggtaagacagaggatgcaagcgttatccggaatgattgggcgtaaagatggaaaacaaatccttgtggaatttcatatcatagaaaaatgaaatcgaaaatattcggagatggcaaatattcggagatgactatgaaaacacctctctggatcctcgaattgaaagagagattgagagggattatcataagagattcccaccatatcaaaagattcgcgttcttgaaaatcggaacttctccaaatccagaagacagatgggattctaggattatccttttgggcaaagacttttatgcatacttcttctgggttatctataccatactgtattctcgtaagatgatacacgctagctaaagatccaccgggtgcaacgtcataaggacattgggaacgtaaataattgtaaccatatacatataaaatgacagcaatggaatcccaatcctctgcttttatttgcaaagtctctattcctcgatgatcgaagcccaaagatctatgaaccacctcatgtttgactagccaattagataaccaaccctgctgcattatcttgatctctcctcctttgtataaatatttcgcagttcgaatgcaagtttgaaatattgccctgctctttctttttcggcacaaagagctcctcctaattcactaatttgtaggaagatactggacttttggatttgaaaaaagtttcagaagatatgtctaaagtagatggtgattgatagagcaattcttgctcataagttccagtattagtactgcgccgaacataaagcttgtggttggtagtaaaacatcgatttttcttttgagatagagttcgatcctcaactatttctcgcgatatcttcttacgaagttttgttagggcatctataacagcctctggtttaggtgggcaacccggcaagtagacgtccacaggaattaacttatcaactccccgaacagtactataggaatccgtactgaacattccaccagtaatagtacaagctcccatagcaaaaaaggagaagtcattccaatcctcaattctcctttcgagattcggcgatagtgaatcaattgaacgcgcttcgaagatttgttctacttttggaagaccttgcgttatgtcactagatctcgctttttcgtatataaacgtaactaacctatcccctttgtaaaggatttctccataatgaccatgaacagttgctcctgtagtggccaaataaggcttagctgctcttataacaaaggaatctatatttacaatgaaaatttgacctgatttttttatgtgcgatttaaatagacatacattttcgcaaataaattgtccaaggtgaatttttgctgatgtctcttcccaagaatcatgagggagaaagtgccaatttaactggaatggatccaacatgatgttactatcgaaatttgaagtcctttgattttcatttattaaagagtgtttaagtccttgaagtactttgaagttttgtttcaaattgtcaaggagcaaatgcttttttaacaggatctgattatacgttagtaaatagtaagatgaagaaaaattcgatatactaggtgcaatagtacctaagagtcccgaaaaatttcgaaagagcccccaaaattttggaataggaattctaggattcgattcttttaccccattgggattttttgaattcttaaaaaaaccaattcgagaacagttggatgccgacaaaaccatcaaagattggtattctttatttcgattcaacaaggtaccaatagcttcttgatgttggctaagtgattgaatcttcgccttggaataaaaggaattggtattggtgcgatctaacctattatggagaatcagtcctgcacttctgctatcatacctttttcgtgtatacgaaatagtggatttgattaacccaattcttaggaaatcgcgaatcagaccatttgctcttatctcaacaagggaagcacgagcctcctctttttcttcttgttcccaattcaatactaagcaagttcgaacgaattgactattcgtatgataaattctttgagttaacttgctattttcatgagaaataaaattgacaagtcgaagttggagattaccctcttcctgcaagagatcctgtgggaaaagtgttgctaaatttctcccttcgttcatttcatacgcgactgcaggtcgaaccaaaacaaaatacttttccttgctcttgagaatttttttccactgaacatagacccaattttcccttttttttgattccttcgaatcttttttttctctttctagtggtatcaaactgccacctaatatcttatccgcctcttcaggaaaatgaatatctccaaaaaagatttttagttccgtatggcttttttttctcttcactcgaaccaatccacccagccgacttcttgtattttttgtgagttgtgtatccactccaataatactattgtcaagtacctttagggatgaggatctcggcaagatatgcagttcttggagaatgaaaaaaaaccgatctacttctttttggtattttagactaaattcttttgttcctcgatgctcaatcaaaacccccttttttaagacggaatcttcctccgggttcccatattcgtcctctgagtcttcctctgagtcttcctctaaagtcccatgttcgtcctctgagtcttcctctaaagtgccatatttatcctctcggggcctatatttgttctctggactcccatattcgtcctcggattcctcctctcgagtcctatattcgtcctctaggattccatattcatcttctagggtttcatattcgttctctgggatcccatattcatcttctagggtttcatactcctcctctcgagtcctatattcgtcttctagggttttacattcttcctctcgggtcctatattcgttttctgggctcccgtattcgttctctgagtctttctctcgagtcctatattcgtcctctagggtcctatatctaaatttaacaattcctgaacccttttttagctttcaaattgatgccacatcttcaagattgccacatcaggacaaagaaagaaatcatatcagatgataatatatagtttcccaaaaagagatctagccatgcttccgaccgttttgattctttagaacaactcgatgaatttagtagatccttttaggaggccctcaatgaccatagatcgaacctatcctatttttacagtgcgatggctggctgttcacggactagctgtacctactgtttttttcttgggatcaatatcagcaatgcagttcatccaacgataaaccaaattccaactatagaactatgacacaatcaaacccgaatgaacaaaatgttgaattgaatcgtaccagtctatactggggtttattactcatttttgtacttgctgttttattttccaattacttcttcaattgagagaaagaaagagagtagtaagaattctcttatccccatttggaaggataccatccttataactatccatgactgtttttgtctctagcatgaccacttgataaaatgtggaggaaagtaggggaaatggccgatactactggaagaattcctctttggctgataggtactgtaaccggtattgctgtgattggtttaataggtgttttcttttacggttcatattctggattgggttcatctctatagtaattggagggaccaggttgtaaacatgaaaaaataggaacttagcgggtccttaccccttttatctgattagagcggaaaggacccgcggaattcttactcttataacccgacttttttaatctattccgtaacctacaaacgggtttcctattttgatttgtaaaaataacaaagagaaagcctttgctctgatggtcagaatccctctatttattcgttttgtttgttaattttgtttgttaataatgttagtgaagtaatccatcagttgatttataaccccctcgccaatgaaattaattcacttttatgaagcgaggagaaagaaaggatcaatcgaggatccaatattttattccccggaggaagtctcttgtaaatcattgatttaatttagagtaataaactaataaaaccttaattaaaactactctcaactagcctaaaaataaaaaacagccttcaatggaagagtatccttttttttgcaaaatttctgtaagttctaaattgaacttaattgaacaagtcaagcaattctatttggtcacaaaaaatttgtcccccgccatattttctttccctctttttgtccactacatcgcctgaacctaagcaaaagaggttcaagagacagacccaaataaagaagaaatagtaatctttgccgaataggaagaaaaaagattcatatttcgatacaagaagaatcgacacaagaaaatggcaaaaaagcctttttcttgtgcccaatagaggattaagaagaccagcaatccctcctaaaaggatttgttccttttattgttctcgcccttgccttgcattctcctcgttttgcatgagatgatagaaataaggaattgcagacaagacatctcgcaaacaaaaaatagtctaaacaaaaaaaagatttccaaaatggatcatagagaattctagcaatcgccaataaatcgcggctttttaccaacttgatggtaagaaatcccgggacctagaaattcatttcgtacaattgaaccttttcaaactgtttctttttgagaaccaaaaaaacttgtgccaaaataacggatgcgaagaagaacaaaaggccttgaacgcgtaatggatcctgaagcactatttctgcatccccctgaccaaaccctcccacattaggattacttgttaatggttgatcaagcttgatcgattccccctctgaaacaagaagttctggaccgggaggtataagatcaatcacttggcgtccatccgatgcatcgactatggatatttcatatccccccttttctttacgcagtatttttcttactacaactgttgacgttgcattatagaccgtattgttactcttgctaccatcaggatagatctgtccccttcctcggtttccccccacatatatgggatattttaagaaatgaacgtctttcttcatagcagggtcgggggaaagaatgggaaagacgatttcactatatttcttaccgggaacagggcctatcacaagaatattttttttattgggacgataactctgaaaagagagatttcctatcttttctttcaactcaggagaaatacggtcgggcggcgctaattcgaatccctcgggcaaaataagaacagcacccacattcaaccctccctttttcccattagcaagaacttgtttcagttgcatatcataaggaattcgaagaactgcttcaaatacagtatcgggaagcactgcttggggaacttcaatatccacaggcttattcgctaaatggcaattggcacatacaattcgtccagttgcttctcgtgggttttcataaccttgctgcgcaaaaatgggacatgcatttgaaatagatgtccgagttattacgtatatcatgatcgatacagaaatcgatcgagtcatctgttcctttacccaagaaaaagtatttctattttccatgtccaatcacagatcccggaatttctacaataaattagataggtagctaagctaatctagttccctatacacgaatctgttgtcattctactgcaacagttgtactggaatgatgaataccttgagcaggtagaaatagaaaaaaagaattttgctaaaatggaaaaaggctttctttctaaaggaaaaaggatgctaattttgattaatatcaggagatcaaatgagtttatgcttcactaattgaatgataaatgactacaagcgaaggagataggcggtttaaacaaaaaaagacccaaaatttcaaacatgtatctagaatcacaggaaaacaacaaacaaaaatagtgaaaattagctcgttaggaacccatccaagatcgttatagacccaacgaattagtagttcccaaccgcgggtggagtgaaatccaacaaaaaaatcagtaactaaaagaataaaaaaagcttttactgagtcatttaagttatagaagaattcctgaacccaagaattcaaaataacaagttcctctttacccagaaaaaaagaaccacttagaatagccaaacagattatatttgtcgagaaatgcaaaatgatatggagatgaccctcattatctattttggccaattgtattatttccttgcgtattcctataggggggttttgtacatgtgtattcggtttctcttttatcatttcgtccaagataaaaaggtcttctaattccatgaatctttctagaactcttttctcttgaatagcagttaagagagtttgggattgcctggtattccaccaattcttaatccaaagttccagacatttgttaaaagagaaagagactccccaaggcaaaagtacgataaatacaagatataggaaagaaggcaatgctttcttttttttcatttttgatctgtaaattgagttgttaatgaatccgctttattcgctgactctatatgatatttctttttctttgaaggaaaaaatctataacaaggtttgagaccttgtatctattcctcttttttctatactagtagaatttcattgcattgagttctttcttagatctagatggagtggaatagagaaatagaaaaaagtcctttcggatgaaaatggaagaatattacgccatatatcccacttggacaaattagaagcaattttctcttatcctcatttgttccttcctttagataaatactcaaaatccccttacaataatgcaatttcgaagggaccttttccctcgtgttgagaaaacttttcttcttccaattcttcttcattcaattcatttcaaaaaattcaattggtactcaaaatacttccattggtatgcgcaagaaataagccaattcggcagctttttgttcaatttctcgtggagtaaaaaacttctcatcagtacgagtcaagggaatggccccctggccccagatttccatataaaggatacgacgaggaaaaagaccttctttaacctgaattctaattgattggatatcccgcataaggaatcgaaggaagacgcgacgttttattccagggaatccccaacgaaaaatgcacactactccctcttttctatcgaatcggtcataaccactgcctacattccacaaaatagtgcaccacaagtaagcgctaatgaataggcctgcgattccgtagaaagacatcacgaccccctgtggaaaaaaaggaatttgttgagatggaagtacagatataatattcttaccaagataactggaagccccaaccgctaagaatcctagtgaacctagaaaaagaatacaggcccagaaaaaattacctctttttcgagaaccttttagaagttctatccatatgtgttctgatcgccaattcatattagatatactaacagcggtcgattgaaattgagagaataagctaaatgattttgactttactttttttgattctgaaatcgccttcgccttcgtagtaacaatataaacatcaacaacttcaaattggactcgtttccccacaacaaataaaggcttgggctaacaaaacactacctaatggggaagttgttggcgaagtcacaaggccctccacttttcattataaaaccgataaaccagaaaaagatggattgttttgcgaaagaatctttggacccataaaaagcagaatttgtgcttgtggaaattctcgagcgagcggacctgaaaacgaagacgaaagattttgccaaaaatgcggagtagaatttgttgatctagataatgtttcctaccctgaaattttcttgtctttccctaatgctaaggagaagaagaggattgagtcaaaagaaaaagctattttggagttttatcaacaatttgcttgtgtaggtggggacctggtattttcggaatccttatgtgaggaattacaaaagaaattttttcaacaaaaatgtgaattaggaaggattggtcgatgaaatatgaatcgaagactgaatcttgatatacctcagaacagcaccttcttgttaccgcgagatgtattggccgctacggatcatttgattggaatgaaatttgaaacgggtatacttgacgatgacgatatgaatcacttgaaaaataaacgtattcgttcggttgcggatctgttacaagatcaattcggactggctcttggtcgtttacaacatgcggttcaaaaaactatccgtagagtattcatacgtcaatcaaaaccgactccacaaactttggtaactccaacttcaacctcgattttattaataactacttacgagaccttctttggtacatatcccttatctcaagtttttgatcaaaccaatccattgacacaaacggttcatgggcgaaaagtgagttgtttgggtcctggaggattgacggggagaactgcaagttttcggagccgagatatccatccgagtcactatgggcgtatttgtccaattgacacgtccgaaggaatcaacgttggacttactggatctttagctattcatgcgagaattgatcattggtggggatccgtagagagtccattttatgaaatatctgagaaagcaaagaaaaaaaaagagagacaggtggtttatttatcaccaaatagagatgagtattatatgatagcagcaggaaattctttgtccttgaatcggggtattcaggaagaacaggttgttccagctagataccgtcaagaattcctgactattgcatgggaacagattcatgttagaagtatttttcctttccaatatttttctattgggggttctctcattccttttattgagcataatgatgcgaatcgagctttaatgagttctaatatgcagcgccaagcagttccgctttctcggtccgagaagtgcattgttggaactggattggaacgccaaacaactctagattcgagggtttctgttatagccgaacgcgagggaaagatcatttctactaatagtcacaagatccttttatcaagtagtgggaagactataagtattcctttagttacccatcggcgctctaacaaaaatacttgtatgcaccaaaaacctcgggttccgcggggtaaatccattaaaaaaggacaaattttagcggagggggctgctacggttggtggggaacttgctttaggaaaaaacgtattagtagcttatatgccatgggaaggttacaattttgaagacgcagtattaattagcgaacgtttggtatatgaggatatttatacttcatctgatgtcaatatcctgttttgggatttcgattgaaataccctttatgggtgttttacgtagaaatactatagttgcttattttgacgacccacgatacaaaaaagataaaaagggttcaggaattgttaaatttagatataggaccctagaggacgaatataggactcgagagaaagactcagagaacgaatacgggagcccagaaaacgaatataggacccgagaggaagaatgtaaaaccctagaagacgaatataggactcgagaggaggagtatgaaaccctagaagatgaatatgggatcccagagaacgaatatgaaaccctagaagatgaatatggaatcctagaggacgaatataggactcgagaggaggaatccgaggacgaatatgggagtccagagaacaaatataggccccgagaggataaatatggcactttagaggaagactcagaggacgaacatgggactttagaggaagactcagaggaagactcagaggacgaatatgggaacccggaggaagattccgtcttaaaaaagggggttttgattgagcatcgaggaacaaaagaatttagtctaaaataccaaaaagaagtagatcagttttttttcattctccaagaactgcatatcttgccgagatcctcatccctaaaggtacttgacaatagtattattggagtggatacacaactcacaaaaaatacaagaagtcggctgggtggattggttcgagtgaagagaaaaaaaagccatacggaactaaaaatcttttctggagatattcattttcctgaagaggcggataagatattaggtggcagtttgataccactagaaagagaaaaaaaagattcgaaggaatcaaaaaaaagggaaaattgggtctatgttcagtggaaaaaaattctcaagagcaaggaaaagtattttgttttggttcgacctgcagtcgcgtatgaaatgaacgaagggagaaatttagcaacacttttcccacaggatctcttgcaggaagagggtaatctccaacttcgacttgtcaattttatttctcatgaaaatagcaagttaactcaaagaatttatcatacgaatagtcaattcgttcgaacttgcttagtattgaattgggaacaagaagaaaaagaggaggctcgtgcttcccttgttgagataagagcaaatggtctgattcgcgatttcctaagaattgggttaatcaaatccactatttcgtatacatgaaaaaggtatgatagcagaagtgcaggactgattctccataataggttagatcgcaccaataccaattccttttattccaaggcgaagattcaatcacttagccaacatcaagaagctattggtaccttgttgaatcgaaataaagaataccaatctttgatggttttgtcggcatccaactgttctcgaattggtttttttaagaattcaaaaaatcccaatggggtaaaagaatcgaatcctagaattcctattccaaaattttgggggctctttcgaaatttttcgggactcttaggtactattgcacctagtatatcgaatttttcttcatcttactatttactaacgtataatcagatccggttaaaaaagcatttgctccttgacaatttgaaacaaaacttcaaagtacttcaaggacttaaacactctttaataaatgaaaatcaaaggacttcaaatttcgatagtaacatcatgttggatccattccagttaaattggcactttctccctcatgattcttgggaagagacatcagcaaaaattcaccttggacaatttatttgcgaaaatgtgtctatttaaatcgcacataaaaaaatcaggtcaaattttcattgtaaatatagattcctttgttataagagcagctaagccttatttggccactacaggagcaactgttcatggtcattatggagaaatcctttacaaaggggataggttagttacgtttatatacgaaaaagcgagatctagtgacataacgcaaggtcttccaaaagtagaacaaatcttcgaagcgcgttcaattgattcattatcgccgaatctcgaaaggagaattgaggattggaatgagcgtataccaagaattcttgggggtccttggggattcttgattggagctgagttaaccatagcccaaagtcgtacctctttggttaataagatccaaaaggtttatcgatcccaaggggtacagatccataatagacatatagagattattatacgccaagtaacatcaaaagtgcgggtttccgaagatggaatgtctaatgttttttcacctggggaattaattggactattgcgagcagagcgagcagggcgggctttggatgaatcgatctattatcgggcaatcttattgggaataacaagggtttccctgaatacccaaagtttcatatctgaagcaagttttcaagaaactgatcgagttttagcaaaagctgccttacgaggtcgtattgattggttgaaaggcctgaaagaaaacgtagttctgggggggattatacctgttggtaccggattccaaaaatttgtgcaccgttacccacaagacaagaacctttatttcgaaattcaaaaaaaaaactatttgcgtcggaaatgagagatattttgtttctccatacagaattagtttcttctgattctgacgtaacaaacaatttctatgagacatcagaatcaccatttaccccatttatatgatttaaggatacataaagcagattttttactttaaactagattttttaccttagaacgctaagaggttagattttctatttttattttaatttaaaaagaagtttagttaattcattaaggttatgcttataccatgtagaaggttccatcggaacaattattatttatttcaagctatttcggctctttcttaatcttcgaaaagaaagaaatttcgtaatggaaaggtaggatgaaaaaaaagaaaaaatcaaaaggaagtgtggaaaaaatgacaagaagatattggaacatcaatttgaaagagatgatagaagcgggagttcattttggtcatggtattaagaaatggaatcctaaaatggccccttacatctcggcaaagcgtaaaggtactcatattacaaatctcgctagaaccacccgttttttatcagaagcttgtgatttagtttttgatgcagcaagtcagggaaaaagcttcttaattgttggtaccaaaaaaagagcagcggatttagtagcatcagctgcaataagggctcgttgtcattatgttaataaaaagtggttcagtggtatgttaacgaattggtcgattactaaaactagactttctcaatttagagacttaagagcagaagaaaagatggaaaaattccaccatctcccaaaaagagatgtggcaatcttgaagagaaaattatctaccttgcaaagatatctcggcgggatcaaatatatgacgaggttgcctgacattgtgatcgtcctcgatcagcaaaaagagtatatagctcttcgggaatgtgccattttggggattcctactatttctttagccgatacaaattgtgacccagatctcgcgaatatatcgattccagccaacgatgacactatgacttcaattcgattgattcttaacaaattagtatttgcaatttgtgagggccgttctctctatataagaaatcattgattaagaagaatagttaattcttgggcaactgcgtagatttatggaatcacttactattcttttttgttttgcatagaaaaaggacggggaatattgatatatattagagggtattgatatatattatcatctgatgtgatttcttgatatcctaaatataagattaatacttcacgttgctgagttgagaaaaagatggttgaatcaaaagaattctttttttgaagttcattttttatcaggggacaatatgaatattataccgtgttccattaaaacactcaaggggttatacgatatatcgggcgtagaagtaggccaacacttctattggcaaataggaggtttccaaattcatgcccaagtacttatcacttctacgcacaataatatgttgaactacttcaacaagtctacgtgtaagatatccagcatccgccgttcgtacagcagtatctacaacccctttgcgggctccgtagcaggaaattatatattctgtcaaagaaagtccctcgcgtaaattgctttgaataggtaaatcaatcatttgtccttgaggatccgccattaatcctcgcatacctactaattggtgtacctgcgatgcatttcctctagctcctgaaaaagacattagatagactggattagaaggatctgttatccgaaaattcgaattcatttcgtgtttcaaatattcacttgtagcataccagatttcaacggattggcgtaatttttctaccgcgtgtacagccccataataatagtgtttttccaaaagaaaactctgttgttccgcatcttggactaaccatcccttagagggtattgttaaaagatcctcgattcctaatgaaatcgatgtagtagtggcttgatggaagcccagcgtttttatttgatccagtatatgggatgtatatcccattccgaaatgatctattaatctgctaataagtcgtttcatagcagttccatctatctctttattctgaaagaccagattggcccgttccgccataaataagtaccccctttttcggctgagtataattcgacaattgctgagtaggattcgacaatgggcctgagtcagtgattcgaaaacttagttaacttcctttcctcaatctcaatctggattcgtgcggcaaaaatgatgattctagcgaaatcggaatgcccctcgaaaggggcatccccgaatctaacttccttgtttagatagtgtatgaataggcctgactaaatccttgtatggcttcctctatttctctataaaaagaaatatgaccaagagtggtgcgaatgtatatagaacggatttccttttttctatttcccactactagatagtgggcataaatctcacgataagtccccaaagattcatattgaacttcaatcggaacttctcttaacccaatgacgcgttgatctagtttccatcggagccacaagggactgtctaaacagatttgtttctgtctataagctcccagtgcatcataggaactagaaaaaagagattctttatctttcgtatacttaggattattattattgtaatttactttttggtttggatagtttccgcaactattatatctatttgcacaaatacctcgacggtttccaatcgttaatacataaagtccgataagcatgtcttgggttggtacgcaaataggatccccaatagcgggagataggagattcatatgagaaaacataagtaaacgagcttccgcctgagcttccaaggataaaggtagatgaacagccatttgatccccatcaaagtctgcattgaaacctttacacactaatgggtgtaaacaaatagtacgcccctctactaaagtgggttggaaagcctgtatgcctaatctatgcagggtaggtgctctattcaacagtacaggatgtcccctcataacttcttgaagtatttcccatacaatgggttccttttcccaaattttccttttagcaatcctaacattagaagtagcacgtttcgtgattaaatcgcgaattacaaatagctgaaaaagctttattgctatctctagaggtaacccacattgatgtaatgaaagtgaaggacccacaacaatgacagaacgccccgagtaatcgacccgtttcccaagcagagtttcgcgaaacctcccctctttaccttcaattacatctgaaagtgatttgtatactttattgtgaccatccctcgttggttgcccgcgggacccactatcaagaagtgtatccacggcttcttgtaccaatttttcctggcacattactaaatctgctggcgctaattcacttctttttaatagataggcaagattgttgttccgacggataactctcttataaagttcattaatatccgaagtcactactttatccccagacctataaacaatgggtcttaattcgggaggaagaactggtaataagcacaaaaccatccattctggttctacatttgtttgaataaaatgtttcgccaattgcatgcgtctaatcaaaaaaacttttcttattcgtctttttctatcttcccattcatctccactatacccctcgtcttctaattccttccattcgaccgaggaattctctaaaataattcgcaaatccaaatctgctaattgttctctaatagcacctgctcctgtcgcaatttcccgatttcgaaatgttgtaaagcctggggtagaaaaaaagggggaaatgctatggttacaggatgaaatttcatcctcgaataaacctcgtaatcgtaagaaagttggttttttagcactgggcctagcaaaagagaaatcgccatatactaggccctccaatttcttaaggggtttatctaaaagattcgtgatataactaggaagaccttttaaataccacacatgagtcacgggacatgcgagtttgatgtatcccatttgatatcttcgtatccgagaatcaacaaattctactccgcatttttggcaaaatctttcgtcttcgttttcagctccgctcgctcgagaatttccacaagcacaaattctgctttttatgggtccaaagattctttcgcaaaacaatccatctttttctggtttatcggttttataatgaaaagtggagggccttgtgacttcgccaacgacttccccattaggtagtgttttgttagcccaagcctttatttgttgaggggaaacgagtccaatttgaagttgttgatgtttatattggtcaatcataaaatagaaataaaaaaagaatttatatttattccgatcaaacttcttccctattaacctggaagttcttctgagatacaaggaaatggttcagttctagagccaaagatcgtagttctcgaacaagcactcgaaaagattctggaggatccttgtgattaggtactcgttttccccagatcgtagcgttaagtatttcttggcgagctataagatgatcagatttataagtaagtatctcttgtaaaatatgagcaacaccaaatccttctaaagcccaaacttccatttctcctattcgttgtcccccttgcttggctcttcctctaacgggttgttgtgtaacaagtgaatagggcccaatagagcgtccgtggattttctcatcaacttgatgaattaattttaagatataggacttccctattagaacaggctgttcgaaggggtctcctgttcttccatcaaatattctgctttttcccgggtactcgggttcaaatacccacggattttttgtttgtttactggcttcatataattctgaaaacacaagttttcttgaagcctcttgctcatatctctcatcaaagggtgctattctataatgtttctttagcagatcccctgctaatccgagcgagctttcaaatatttgtcccacattcattcgggagggtactcctaagggattgaaaaccatatcaacaggcgttccatcttgcaaatagggcatatcttgcctaggcaaaattttggaaatgatccccttattcccgtgtcttccggctactttatccccaactttgatttcgcgtttttgtaaaatatatacacaaaccattatgtcgaggggatccctctggatccatttcacatcgataacgcgtcctcttccacctatcggtagtttgagagaagtttcttttgaagtggatacctcaagaccaaatatggcccgtaataatccagcttccgcgatataggacgattcgctcgctatctgaggcgttaatttacctactaaaatatcgcctgtttctacccaggaccccaacttcacaactccatttctgtccaaattgcggagtaaatgttcttctagatgtggtatttctttagtgattttttcagcggagccttggcttgttgtatccgtctgaatttcatattttcggatgtgaaaagaagtataaatatcctcatataccaaacgttcgctaattaatactgcgtcttcaaaattgtaaccttcccatggcatataagctactaatacgttttttcctaaagcaagttccccaccaaccgtagcagccccctccgctaaaatttgtccttttttaatggatttaccccgcggaacccgaggtttttggtgcatacaagtatttttgttagagcgccgatgggtaactaaaggaatacttatagtcttcccactacttgataaaaggatcttgtgactattagtagaaatgatctttccctcgcgttcggctataacagaaaccctcgaatctagagctgtttggcgttccaatccagttccaacaatgcacttctcggaccgagaaagcggaactgcttggcgctgcatattagaactcattaaagctcgattcgcatcattatgctcaataaaaggaatgagagaacccccaatagaaaaatattggaaaggaaaaatacttctaacatgaatctgttcccatgcaatagtcaggaattcttgacggtatctagctggaacaacctgttcttcctgaataccccggttcaaggacaaagaatttcctgctgctatcatataatactcatctctatttggtgataaataaaccacctgtctctctttttttttctttgctttctcagatatttcataaaatggactctctacggatccccaccaatgatcaattctcgcataaatagctaaagatccagtaagtccaacgttgattccttcggacgtgtcaattggacaaatacgcccatagtgactcggatggatatctcggctccgaaaacttgcagttctccccgtcaatcctccaggacccaaacaactcacttttcgcccatgaaccgtttgtgtcaatggattggtttgatcaaaaacttgagataagggatatgtaccaaagaaggtctcgtaagtagttattaataaaatcgaggttgaagttggagttaccaaagtttgtggagtcggttttgattgacgtatgaatactctacggatagttttttgaaccgcatgttgtaaacgaccaagagccagtccgaattgatcttgtaacagatccacaaccgaacgaatacgtttatttttcaagtgattcatatcgtcatcgtcaagtatacccgtttcaaatttcattccaatcaaatgatccgtagcggccaatacatctcgcggtaacaagaaggtgctgttctgaggtatatcaagattcagtcttcgattcatatttcgtcgaccaatccttcctaattcacatttttgttgaaaaaatttcttttgtaattcctcacataaggattccgaaaataccaggtccccacctacacaaacaaattgttgataaaactccaaaatagctttttctttttactcaatcctcttcttctccttagcattagggaaagacaagaaaatttcagggtaggaaacattatctagaatttcttttagatttgaacccatagctgatgatagaactagaatagatatcttttgttttctactcacgcgagcccatatcctttcttttttatcaattgctaattccgatcttcctccccaatctgatattatagtcccggtgtagatagaaattcctttatggtctaattccgagcggtagtaaataccaggacttagcaatatttgattgatcataattcggtatattccatttattataaaggttcctaaggaattcattataggaatgtttccaatagaaatggtttgcttttgcacatcgaaaccaaaaattaatcgcgcggatacgtataattcggaagaataggtgagtgattcatacacagcatccctttcttttatcgaaggttctagcaattgatatcctttcgcaaataattgaaatgaaatttcgtgatctggatctttaattgttggaaacttctcaagttcttctgccaagccttgattaatgaacctacaaaatccctcgaattggatctgactaaatccgggtattgtggacattccctcatttccattccggagcatcttaatcttaagtttcctgtttatcgaagaaaaattccattatcagctcactcttcatcaatccctacagatcgatctagcaattatggaatctatattctgtttactaaatcacatgaaattctcgggaactccacatacgtatttcatatatgtatttcatacatatgaatagagacaatttcaacgaaagttcgaatttcccaggggtccaaatggaatgaaaatgaagtgataaaacattcctagaacctcgaaaaaaattctgccacttacagtttatgatattcttagattggacggcaaagatttctcattttttctcctttctatgaatgggataaaaccaaaatataataatttataagcactagaaagtttgactttagttcgattgagaatagcacgcttagtttaatttcaaaaaagaatttgaaggttcttttttgtttcgtagtagtagaatttctataaaatataagatataagatttcgttgtagaatcctaaaataaagtaagtacttttttaagtacatgccaatctagttctggacctccacatagcaaagtcaattttcttttttttattcaagatatttaatgcaatgaaaaattaaagaacgattctccacagagatatgtacataagggggatccatagataataatgctgttcggacctggagtttacctatatacggattaggcataaatccattgtcttttattatgacattaaatggcaggcgggagagaataccgaaattcaaaataaaaagagaattctagttaatggttccaatttgttcttaattttgtagcttgtgactagaaatccacttttctcctttttcatttcaatagaaagaaaagggaagttttctagtgttagcaatgtgtgttttaagatagaatcctttgaggagaataatcgaaactggattcaaaaaaagcatgaatagattttttgaaaaagattggaaaaaagtaagtagaattagatttaagataaaagaaagttagttttagtaagaaacgtggatgaatacttgctcttttctcgattttagatcgtattttttggcggcatggccaagcggtaaggcaggggactgcaaatcctttatccccagttcaaatctgggtgccgcctgatcaataaaatacttaggcttatagcactgatccaaatcgacaaatttgcaccccgcataagttggggcaagagaataacaaggctcggcgatactggattttgagaacccaccgttctttcctcaaactggggtttgttttagcagtagtggcccaaaccgataccaatagggatgagatagcgtttccttattcttttattaataagaaagggctatgtatcatatttatacttaatgctccccaattctaccagaaatactctaagaatttgttaagagtaaattctttgaactgattcatccatagccttaggtcagaacccctttttgactctgtacccttgattctactatgattattcatcaatagtagaataattccttcatagaaataggagacataatttacatggatatagtaagtctcgcttgggctgctttaatggtagtctttacattttctctttcactagtagtatgggggaggagtggactctagggatactactaattgattgagtagtcgaattgttgtatcaactcttttctttaattgaccgttttgcattaatcattttgccgaactttattctttctctctttctttaattttgtttcactcctgtaagaaactcttgtaagaaagagtctttctattctttctatttctatttctatatagtagaatagaaatagaaatagaaagaatagaaaatagaaatagaaagagcggtgagagcaattcataatcgctactagaagcgacccatggttaaaaaagttctatacataagaactttagattttcttccgcggagctattcccaacatatcgcacattttccatttgttttatattcttttcttattcttagttcttaaaataaattttatgcacttttgaaacatttcgcgacatgtttaagcatgaaagattcgctggttttttccttttactttttttcttttactatagtctattctcatattatttttctctccctccatggattttttcattttgacttgattgaaattaagtggatgcagtgaaaaaagatattctattctatgtagattcaagataatataatagaaagactctaaagtgtggtagaaaaaactatatgtagttttttctaccacactttatgattccaaccggatcctttcatttaagacttggatttttattttatttaatccctttttcatttcttcaatgattaattgaacttccaattaatcattttggctgactgtttttacataaataataagtaaaaaggcagtaggaactagaatgaacaatgcagtagcaataaatgcgagaatattgacttccataacctcttttttttcgcaataactcgggatgtaatcccatggagagggaaaagggtatcctgtaaattcaaggggaggacttgcattctgataatactgaatcaattcaatattatgaatatcggatctatcaaatcaattcatggttgagagtggaatagtataacataggaggatcccttccacgtatgatatgtatgtctttcgctatcaaccagaagtagtgataaaaaaattcctatactctcctctctttactgagaaacgcgaactaaaaaaagtgaaataagggtaccccataggtatttgatcttgcttcctgccccccttttttcatggaaaaaggaaagatgaatttctccattcattgaaccctagttcgggactgacggggctcgaacccgcagcttccgccttgacagggcggtgctctgaccaattgaactacaatccccgcggggcgtatggcatacttattcttaaatggaaccataagaataagaatattcgcctgtcctactctaagaaatagaccaatcatatactacatacccccgtatcgtatgggggtatagtgagaatgacataactagtatgtcgcgatttattatcgctaaaaatagataataatccacctttcaataaccaataagaaaaggtcttttgtttgtaagagaggaataaaagagatatagattagaaagatatttccccttttctttttatcctttatttcttttatttctatggatcaaatattcttttttatggaagaaaaaaaatggatttaactcatattcacgaagccctagatttttgggccgagctggatttgaactagcgtagacatattgtcaacgaatttacagtccgtccccattaaccgctcgggcatcgacccaggaagaatttattctagggtttttgataatctatgattaacctcctttcataatactccctacccccaggggaagtcgaatccccgctgcctccttgaaagagagatgtcctgaaccactagacgataggggcatcactagacgatagggcggtatacaaccgctcctcattatactataatgatagtatgagcagttttttggaattgtcaatatactcgaagagtataactagatccaaagcaaggagtccttcctacttttccattatgcttttgtaggattttttttagttgatggttaggttaattcacggatcatcccctactttttagggaaattcgtttataaaggatatggaataagaatagattaataaaagggattctatattagttcagtacgggtagtgatttgattgatctaataggaaaaagagtccaatttcttttttggaatttacacccccctgcttcgcttagtgtttaaactaaaaatgcatgcatctcgcactaagttatcaaattcaataaaaaaagagaaattttcaaaaagaaagaaagtgaatgaatttagtagaaaagtactgtatcggatttgaaccactgactcacgtcttaccgcggcattactctaccactaagtaaaaaaagccctttatcggatttgaaccgatgacttatgccttaccatggcattactctaccactgagttaaaagggcttcttattcaattccaaaattagccactttcatttcccattataggtctactccataatgtacattatatctgtatatatcgagatatataagtctattcatggtcaggttcaaaaaaatcttaagaaaatcaagaaaaataggaaaatctttcatattctctcttatcacttgcacaaagtatagggctttttatctttaggctattgacttttcacatgctcagaacggtctgaaaaattagggacttttttcttctattggctgatcttatcatgaaaactttctccatttatgttttatttcctctaattgggtggggtataaacgaattcgcgcccttcatatacccatatggctgggtattaattttcagtgatatacttcttgtctgttttggtgagaggttgaaacaatttttaacaggcatcccttggaaaaaccttcgagttcaaaactttgcaatttttcttaagcggatttgttgaagcgattttcagcaggtacctcttctcttagaaatatcttagaaatagggtacttgaatattctcaagggattctgattggtgcattttgaacaaactgtagtggagttttatcaccaattttcttgtaaaaggcgggcagtagaatttatactgctcctggttcagggttttccgtttccgaaaactagcaaaaaaggagggttctggaacccttaaggttcgatggtatatggatatggaaaatccaacatgccccatcctaataggaaaaggaagggaacagatacccaatatgattattgggaagaacttttggtaatggtctcgggcctatatgctcttttttgtgtgttcttagttctattcatcttctttgattcttttaaacaagaatctaataaactagaattgagtggaaaagaagagaagaaaaagttaaacggagagaatcgactaagcagagacattcagaatcttctttacatcaagtaaatccttcggctcctatgtgcctttttctttaagttatttattgtttctctcaagccatagggaaagtctatgataaataaaaaaaaacatctcactctttctctatggcccagatttcatgataagtgggggaagatgttttcttccccaaattctttgttcaattctgaacaaaaaagaaagtaaaggaaaggcccgcgatcgaagtaccaaccgctaactgtgaggaaccttctctgtttcattaactaagagggaattagcatctttctcgaatggctacccttgacaaagggtagcgttggtatcagaatttacatgtagcgggtatagtttagtggtaaaagtgtgattcgttctattaataactgaatttgaaatgatatacttaaggcgtccttaaggttttttatattccgatgaaaactttagttcttagaaaggatttactcctttttctctcaatagcatattgaggaagaatatgcattttcgcgatttgtacccaaagactaattgaaattgcatccaaaaaacaaataggatttcgattatgagtacagagtcgcgaagcataattttgcattggattaaggattccaattttttaaatatgagtaaaggatctatggatgaagatacaaaaaaatttatttccaatcgtaactaaatcttcttttgttaaaaaaggaaatggaagccaaatagctaaaaaacggtagttttggtttactagagccatcagcatattgtttcagctcggtggaaacccaattcttttcctcaggatctcttaaatgaaattagggaacgaagtaattagattagatagatttaggcaaatttctatctcctactctttagggatcatctagaaagcagagagccttggttccattcagacaaaaaagctgacttagatgttaagtggtgagaatacccataaaggagccgaatgaaatcaaaatttcatgttcggttttgaattagagacgttaataataatcaaccaacgtcgactataacccctagccttccaagctaacgatgcgggttcgattcccgctacccgctccattctgtataaaataactattctatttgtctagacatggtagaggcctgtattcaacctttttcgtccaccggtttccagcgctccagagcggagtagagcagtttggtagctcacgaggctcataaccttgaggtcacgggttcgattcccgtctccgcacttagcagtctgtataaaaggactattctatttgtctagatatggtagagggctgggtggttgggcggtatccaaccctttttattcattagttcccgaccctataaggccaaattgagcaggttgcgaagtaacttgctaccacaagaggaactctcaaggccccctccctaccttgcagaaaagaaaaaataaatgaaagaaaggcacagtctatctcccttccctttaaaagctgtttgctggttgtttgtttcggtgaatccccggtttagggaaccctgttgccgagttcgattcccgccgctgtagtgctctttttttgagtggggtgcaaagggggttaagatagtaaaggggtatggtactagactaacacctattactttaataaaagtagactaaattttttatcatagtaccttactaaattaagctggcgagcggcgggaatcgaacccgtatcttctccttggcaaggtgatgttttaccattgaactacgctcgctacgtcctatattttatagggtatatccgcctgggtcgaccgtctatgtctgggtcgaccgtttcattttctatttgagttttctttttattaatttaattgtctgtcaatcaattcggggcacaaattgcattttaatgcgtctcacaatccgaataaacggcccttttttattttgtatcgggctactaaatactaaacacatttaagaaatgagagaatttagaatagctaccagaaagaccagtccaatccataatgatgtaccggaaaatacaacgtttttattgtttgaccaaccatcaggagaagcaaatacaaggggtacactaatgactaagactgaggaagtcacaattaatgcaaaaacagctaattggaaagcaatagtcatatttctaatcctccaagttaccatcaaataaagttgactacatattatatttgatccctcacttaatcaaaattgtaataaaatacaagaagtaggaggggtttaatcatgaatccattgattcttctctttaaaacttattactcaccactttttttatttggatatggggttgagggggttttatgctttatttcacaagcggatatagcggatcctgtatacatggatacagtatacagaaatatatcgaaaagggatttgtatttgagatgtttctagaggttagtgagtcatttcgtatggctatgttctatttgtaggaataaaataaggattaggctgtggagagatggctgagtggttgatagctccggtcttgaaaaccggtatagttctaggaactatcgagggttcgaatccctctctctccttttgctttcctctctcttttcttttgcgtattgaatacgtttgtttctttatttgtttttttttgttctgtccccttatctttctttcatagaaaggaatgaatggctcggctagatagaataaccgagccagaacagaaaaaaacagtagaacaggtataaataagaaaatcttagttaagaggggtcatgtaaagaacaggctccaaatcacgatcgattcccttttcaaatcctgctgcagcagcccgggctcttcctgcatgccacaaatggcccacaaaaaagaagaatcctagaacaaaatgggaagtcgctaaccaacttctaggagaaacataattaactgcattgatctcggtagctacgccacccacagaatttaaagagcctaaaggagcatgggtcatatattctgccgaacgtcgttcttgccaaggttgtatgtcttttttcaacctactcaagtccaaaccgttggggccccttagaggttctaaccatggagcacgaaggtcccaaaaatgcatagtttcccctccaaaaataacctctcccgttggggaacgcattagatatttacctaaacctgtgggtccttgggcagatcccacattagctccaagacgctgatctctaactagaaaagtaaatgcttgagcttgagaagcttctggcccagtaggtccataaaactcactcggataagctgtattattgaaccagacaaaacaacaagcgataaaaccaaagacagataaagcgcctaaactataagacaagtaagcttctccagaccatacaaatgcacggcgagcccatgcgaagggtttggttaagatatgccaaattccgccaaatacacaaatgaaacccaaccatacatgtcccccaattatatcttctaaatcatccacactaacaatccaaccctctcccccaaaaggggattttagtaaataaccaaatataacaccggggctaagggtcaaattggtaatttttcttacatctcctcccccaggagcccaggtatcatatataccgccaaaataaagagctttgagtactagaagaaaagcacctatacctaacaaaattaggtgaatacccaaaattgtagtcattttatttctatctttccacacataaccaaagaatggaaaagattcttcaagagtctccggtcccagaagcgcgtgataaatgccaccgaagcctaagactgcggaggaaattagatgaagtactccagatacaaagtacggaaaagtatctagaacttctcccccgggccctactccccaacctagagtagctaagtgcggaagtaaaatcaacccttgttcatacatgggtttttctggtacgaaatgggccacttcaaataggttcattgctccggcccagaatacgattaatcctgcatgggctacgtgagctccaagtagtttacccgacaaattgataagtctggcattcccggcccaccaagcaaaaccggtggtttcttggtcacgaccagctaaaacaaaagttccattaaagagcgtttccacgtggtagaacctcctcagggaatataagattttcatgaggctgatcctgagctgccatccacgcacgaataccctcgtttaaaagaatatttttggtgtagaaagtctcaaattcaggatcttccgctgcacggatttcctgggaaacgaagtcataggcacgtaggttcagagccaggccgactacgccaatagcactcatccataaaccggtgaccggtacaaatagcataaagaaatgtaaccaacgtttattggaaaaagcaacaccaaagatttgggaccaaaagcgattagcggtgaccattgaataagtttcttcagcttgagttgggttaaaagcacggaaggtatttgcaccatcaccgtcctcaaatagagtgttttccacggttgccccaagaatagcgcatagcagagccgcgcctaatactccggcaactcccatcatatgaaatgggttcaacgtccaattatgaaatccttggaagaagaggatgaatcgaaatatcgctgctacgccaaaactcggcgcaaagaaccaaccggattgccccagtggataaatcaggaatacggaaacaaaaacagcgattgggccagagaatgaaattgcattataaggccgaaattgaatagaccgagcaagttcaaattgacgtaacatgaaacctattagtgcaaaagccccatggagagcaacaaaagtccacagaccacctaattgacaccaacgagtaaaatccccttgtgcttccgggccccatagtagcaacaaagagtgtgctaaactattggcaggggtggaaactgctgcggttaagaaattgcaaccttccaaataggaactcgccaatccatgggtataccaagaagttacaaaagttgtccctgtaaaccaacctcctaaagcgaaataagcacaaggaaaaagcaataggccagaccatcctacaaaaacaaaacggtcccttcgtaaccagtcgtccataatatcaaataaatcattttcttctttagtaactctaccaagggctatagtcatagtgatcctcctattcaattacttcaaccatttccgagcaccttatatcacttccaaggcatacgatagattatctgtggacgattttttctcgttcaatgccttttttcaatggtctcgaagatagaaattttgcatttttatctatggggtcacagccgaggtcgtggtaaatccatgaatttgattcaattagtttttcttatactatagaaataaacattggaattcaggattattccatgattcctatttccaagaaagcctattttttaagggaaaaatgaaaaaaagtaacctctcttttcccactcgctctctattgcatgggtataagaacaaaaataggattctgaaaaaaagtaaagatattgaaaagaaaaattgactttcgaaatccatttttatgtgtagcggaaaggggttgcgatttcttcttattcctatagaacatctagtaacaagaatatgaaatagtaaatagcgagaaattcttgccttgcgtggtctaagtctaaggaaatacaaaaaaatccacttatacaatttcatctacatcgaatttatatatcagaatagcggatagaggcctcattcaaggagtcaggtccacttactttatctttctttccaattttatggggtgggttggtttgataagacccctttttgctttgttgataaataataaaaaaaagagtttttttctataacctgcttgttttattataacaagtcctatatggaaatgcctgctgaagagaaaatctatctgattgtcttttagccaatatccaattttagaattagaaagaaaaaagaagaattttcttcttttttttattaacattaagaaaaaagaatataactaaaatggaattggcaatataatttttttgaacttttgaaagaaaaaggaaggattttttgcaatcgttatttcttgcctctgtcatatcacggaaacctttcgatttggaacggggagagatggctgagtggactaaagcggcggattgctaatccgttgtacaatttttttgtaccgagggttcgaatccctctctttccgccccctcggatcgtttgggactttcgagttggaaggaattctgacccccagattttctcgtagataaatgtatgaaacaaatccaatttgtaagaaaaaattttggatttttactcgtcacgcccaggattacgtcctggatcattagataagaatccaaagataaagagggaaacaaagaatatcactactgtataaacaaaaagtttgagagtaagcattacataatctccaagatttttttttaaggaatagattacccgtttttccttaccacacaaatccactaggatgggttttgtttattttgacacctaaaaatgcaaaaatcaatttttgaaaaaaattgcaagaattgatttataataagcactcttatcaataaattaggttaggtattgtgcggttacctaaagatacctgctcaacgtagatgcagggagtagaaaggctgatccaaatttattgctgcagctatacattcaatgtagaagaatttgaattttagaatcgaaggttcataatataagacttctcggctcttatccatttttcgaatttttttagaatgaatacatgattcaatttggcagacagagtagtaaagatttcatcgaaaacttacagcagcttgccaaacaaaggctaatagaaaaaagagtacaggtatgacaggcataaaatccacgattggattgaaaatggcataagcttcgggcaatttggcgaagaaaaaactagtcggataaataacagaattaaaacaaatacaggttaaactaagtatattaggcataacaagcgtttcgttcttgtagagtagataattggattttgattgagttatttttctaagggaaaaaggaaaaggaggattcaaaatccttttttcttcggactttcccaaacacaaaatacctccttgtattcgcactctcatttagttcacgaggataaggtgcagcaagccgacgagccggggaggaggaaggggcggccgaaaggacgctggcgacgaagaggatggagaggccggcgctgcgacggcgttctggcgaaaccgaggagcagccggggtggagggcgatgcggcgacgccgagggaggggacggcagcgccggctgatgcacgggcgcggcggaaggggctgccggaggagacgtcgacgaggaggaaggagaggccggcgcgggcgacggtgttccggcgaaattcgggcgaggaggaggtgatgccggggatgagggcggcgtcgcggagccgagggaggtggtggcgacgtcaaccggcgctcaggcagggagacagaggcggctggaggcggccggcgcggaggaaagggaacggcgacggcgggaacgcagctccgggggtctccgcgggaaacggagggcaagccggggaaggggaggccactgcgatgctggaggaggcgacggcgcgaccggacggcgctctggcgaggagggagaggcggctggaggcggccggcggcacgggagagagaggaggacagcggggagagggctagggaccacgggagatcgcgggagggggctaaaacgatagaacggagcgagggggttgcattttatagcggagggaagcgagccgagcacgggagagggcggaacggcgacgggaatggcggccggcggccatggaaagcggccggagaaaacgcgggcgttcccggcgattgggggcacgatccaagggggaaattgaagaggaatcaatgggatttaaaaccccccaattaattttggaatccatggtttgatttgcgcggatttgagggaggaatggcgctagggttcacgggagagggagagaggacggccgggcgggaggaggacgatgacccgacgcgtgggacccaccggtcaggggcgcggtcagcgcacgcgcggcgtgcgcgtgacaggcgcgtgcggcgcggcttggggaggctcggctgggccgggacacggcccaggcgggagggggcagggcggcccgggaccgggcaggctgggaggggagggaggaacggcccgggagagagaggggagggggagggagagggagagaaaaagagggaggagagagggacttcggccgcgggccgagagagagagagagtggactttgggccaaacttggcccaaaggaggaaggaaggttatttttaggtttttctttttactaaactttgataattgtttttgttgcttaataattatttccggtgctctgaaaattcaagtaaaatttgagggctccttttaaaccaaggagaatttaacaaaaattctccgggccacattcgaatttttcttgtacgcattttagtgtttgccaatttctttccgaattttaattaattctattattccttttagaaaatgatttttatttcgggatgaatttatcaggacgtgacaaatccaccccccttacaagaatctcgtccccgagattcgaggaggctagcatgaagataggttgggcggtcttctcttcttgtctgacttcttccgtcgcgtcttttataacaaacttgcctagaaaaacttctccactctaggctgcttgtctcgatcccttgttgcagatggaatcttctcttcacctgacttgtccctggttgaacctttagctgacttcgactgggttgcggcacttgaggatggggcttcagttccagaacttcgcatagttcaaatctttggagtcaacctcatacaagttacccacttcatgtcatgtgtcgagatcagctcgtcattaccagggtaccatgcttgtcatttacttctaacttgtcaccaactgcctcatattagctttcctgctctccgggtgccagctacttctgctattcgatgcaagggtcggtaactttgcctttgaattatgtttctaaaaagaaccaacttatcccacttgacatgctttgacgtctccccaaatgactttactgctggacttgttatgatctgatcgttatcctgccaaatctgaagcttcgctgttacatgtgattttaatctgacctctgtaaactatcttcgaacatatcacttggttcataactgggaatagctctcacgaacaagcaactcggattcactttccactattctcttcatgttgttattatttagcattcaaagtatgcctttacacattcaaccctgacgtattcttttttttagatttctcttatcaatcacctttcgacctacttctttgcccgataataaacacctttgctgatatcttctatcaatcaccttttaaactttgtcaaccaagtactcttcactccgagagttgtggatgcttctggtgacaatgaggtcctttggcttgctgcctttcagtgaaaccttgaagtggttcatcaaaagctagactgacggttgttgcctttgatccaaagaagacacatctgaaacacttagtccaaacaaatgtctctttggttaatcacttgattttcttttccatcatcaggttgggtattaactcgaggttagaacatagttcctctgaaatgagaccctaggtctcctttgacagtaaccaattatacacataatcccatatcagcatcttccaaaagaatcctcataaatcttgtccgtattacacatttctcccttattacacgaatacaaggcactaccttaaacaaaaagggaagatgcttaacatcggtacattgtttctactatgggttatgattaactcgaggcctcacaggtatggcgtttgctccagtgaccacaaggcgagtgacttgtcttcttcttgcataatggccggagtgatgacgcaggttacgcttcggctgtggacaatctttggagaaatgacctggttctttgcagttgtaacaaatcaatgtcttctttactgagttgtccgtctgggaacgatcattctgacttggagttggaattggtggttggaaatccttgctaacattggcatcagtggtaccatagttgctatcaccattggagtctttctcagagtcaaaattgctagggttgtcattctgggtgccttcattgatactatcgtcgatatcttggtgaatgctgttgacattgcacgcttgatctaagtggtcatgaatggggcaagaaccatggttgttggtggtatcatcagcattagtattgctaatgttgttgtctgcgttgtgtccatcttcttggggtagtaactcttgatgcgcaacagaagatccggtgatctgaagtggctcagtgcgctgtctttggttaccacatggaaatactgggatgttgacaatccttctcttgcagttcgtcatccgattatgctcactttcgagttgcatggctttgtccacaagtttctcaaaatcttcataatcctctaggagtagttgcactgcaagctcatcttttaacccctggagaaacttctcttgtttgtcttcatccgtttccacatcttctggtgcatagtgagccaaacgatagaactcgtgcaggtactctgtgacggtcaaatctccttgcttcaggtagcgaaactctcgttttcttagtgtgatcattcttgcgggaacatgtgatctcttgaatacagatgaaaactcgttccaggtgatggtatgtccttctggccgtgatgcttcgtagctatcccaccactctgaagccggtccaaccaactgatgagttgtgaagccaacccgctcctggtcggtgcactgaatcaaccctagcttcttctcgactgtgcgcaaccaatcactggcttccataggatcgacggcaatggcaaaggttggaggctcagttttgagaaattctgataacttgcactgttgctggactgtaggtacttgaacgttggttgcccctgctgggttgttccaatactgtaatagttgaaaggctgttgccaacatgttggtttggttaaccacaatttggattagctctggtgaggttttgttgatgcttttctcattcccactggcttgggttcttgagtcatcggatccatcattcccatagcctttgttaccagtgttatccatctgtcacaaggtagaggttgagaggggaagcagacaaggaaagaatggaccagaactagggacaagaccttaaaggaactaactcttcttgttgatgtgttgtttgtttcacttattctgcaagttgattaagcaaacaacctagcatggttacatcacaacccaccgatgcaaaccacgcgctacacacacaagcaaggaacacacgactaacaacactaccctatagggtggcttaggttctgcgacgggttctccaagatcttcactccttcacagctggcttcactgcttcctccacttcgctagcggatcctgcagtcttccggagcttcggcgaacaactgacgatgtcttcttcttcactgacctgaccatctagtactagttgaaatttgaagaaggaagaaaagggtaaaccttttgcaaatagcactaggggaagaagaaaaagaggaactttcgcaaatagttttatttataaaatatgtccttaggttttatccacttggcttatcctacagtcgagatggctctgataccagcttgtcacgaccgagaaaaatacgttttcccgaacgctagtgtattaatccccgtcccaggaaaagtcggggtacaccacacaaacatgatataaaagacacatctttattatatcgatagtatttacattattacagaggcgcttcaggcctggcaatcaaaaataaacagtagcggactagcgggcctacggctccatcttcacaggcgctcaactggggtataagccaggactccacctaagacttcttctccaaagcttctcttactgaagggggggggggaaagattgagcaagaatgagtacaaccacagtactcagcaagtcacactggcagatgcgtgattaatgcaagggggtacaaggggataataatataggggttaagttttgcagtaaacagcatttaaaagtcacttagttgcccaaagccattttataaagacgatcctagagctacacaaaattattaatcaaggccgtgaaccctcacgaacctgccttaacccaaggcctacgatgattcagaccgaactggcaacccgaccctgggtcccagctcgtcccaagccaacccaggccaaccattccacattttagttattgagcaaattttaagaattaaaacactgacttgggtacattgctcggcttgcccataaccgagggcgcggctattcgaatagattatactctgatcagaggtgtacatctttacccacaagacacatcttcctcacgtgtaaccacgtgccacataccaccacggtatacggacggaagacgtgacatagtttccaacccatcctagccatagacaagagtaccgacccaaccccacctacggccggaacctccgggacaggtaggcaggattgagcccctagcagcaggacaccagccctgtgccatgacatctcgactaccgggccgcagctcgtgtagccttcatttgtcctagagatgtccatcgacccccgacttcatccacctccatccgtgtacttttgtttataactagactgagccaaaaactaagccttacccactagacatgtggaagtacggtagtgctttgcaacagaggcccgagcttaatccttatagtggccggggtgctacttcccacaactggcatgcacccaaaccccaccgaaaaacaggttttaggggctttgaaagaggaagagaggggtatgtccaattccaccataatccaacaattccataatgtccaaatgatatgagatttcccaatgtctaaagttataaaaccacctaatgttgcctaattaaccagcgaagcatctacctaagttcacactagtggaaccataaatagagtacccactagttggggggggggggtttgtttatcctagggtgaacaaggtaataataacaatagcaataataataaggccataacaaaggtaaataggcatggctaaataaaacagtgataacgcgggaatttaaataaagcgataatgcattaatttaaattaaaataattttataaactgggattcaatatgctcaaggatgatgtgacttgccttgctcagagagaacggccttccgaaccttcggcgacgaccgaaaaccacgcttcgggaacctccggaacgacgaagactacgcgaagcacacaagcaaagctacaagcctataaagaagcaataacaatacataaaaagaaagcacagggttctttaggttataacaaacattaagagacttgaacgggtcgattcggagttcgtatgaccaagatatgatcatccgaagtttagtgctgttatatggagatttgcggattattataattaagctttgcaacaataaaacatgtggaagcgctagcctagaaaagacaggaaggctgcgctgttgacatgcggaccccacatgtcaacctaaaggaccgcggtagaccaggtacacagagacggtccacaggtcgacggaagcggaccccgtgtgtcaaccgaggcgagtagccgacaaacggactccactagacaccacgcgggctgcacacgtggaaaccacgcggctaccgagcgaacacactaacacggacactacacggtcaccacccgcacacgtgaacgactaccgacaccggtacacgggtaccggggtcgacgaccgcacaacgggtacggggcgacaccaaaaggacgaggacggggcagcgagaggacggatccttaccaccacgcgacgaggcgtgggaacgacaacgacgaacgggcgcggcggacggcgagggaacgacttcggcggcgatcctgggacgaaggcgagacacagccggcacgaggcttgacgacgcggaggcgaggacgaagatgacgacggggctgttgcacacttgacgaaacgcgggcggcggacgagaacggcttgacggagggacgaacgccacaacgaccgggaacgacgagaggacgacgacgacgacgaccggggccggcgaggagacgacgagggcagccggcagcggctgcacggaggcgaggatggcgtggaacacaccgctgcgatgccgacgacggaggcggcgccgccagacggcgagccggcgaggatgaacggtgaagacgacgacggacaccggcggtgttcggtcggaggggaggcgaggccgaggacgacgtcgcggctgcgatgccgaagatggtagaggtgcagcaagccgacgagccggggaggaggaaggggcggccgaaaggacgctggcgacgtagaggatggagaggccggcgctgcgacggtgttccggcgaaaccgaggagcagccggggtggagggcgatgcggcgacgccgagggaggggacggcagcgccggctgatgcacgggcgcggcggaaggggctgccggaggagacgtcgacgaggaggaaggagaggccggcgcgggcgacggtgttccggcgaaattcgggcgaggaggaggtgatgccggggatgagggcggcgtcgcggagccaagggaggtgctggcgacgtcaaccggcgctcaggcagggagacagaggcggctggaggcggccggcgcggaggaaagggaagggcgacggcgggaacgcagctccgggggtctccgcgggaaacggagggcaagccggggaaggggaggccactgcgatgctggaggaggcgacggcgcgaccggacggcgctccggcaaggagggagaggcggctggaggcggccggcggcacgggagagagaggaggacggcggggagagggctagggaccacgggagatcgcgggagggggctaaaacgatagaacggagcgagggggttgcattttatagcggagggaagcgagccgagcacgggagagggcggaacggcgacgggaatggcggccggcggccatggaaagcggccggagaaaacgcgggcgttcccggcgattgggggcacgatccaagggggaaattggggggaattgaagaggaatcaatgggatttaaaaccccccaattaattttggaatccatggtttgatttgcgcggatttgagggaggaatggcgctagggttcacgggagagggagagaggacagccgggcgggaggaggacgatgacccggcgcgtgggacccaccggtcaggcgcgcggtcagcgcacgcgcggcgtgcgcgtgacaggcgcgtgcggcgcggcttggggaggctcggctgggccgggacacggcccaggcgggagggggcagggcggcccgggaccgggcaggccgggaggggagggaggaacggcccgggagagagaggggagggggagggagagggagagaaaaagagggaggagagagggacttcggccgcgggccgagagagagagagtggactttgggccaaacttggcccaaaggaggaaggaaggttatttttaggtttttctttttactaaactttgataattgtttttgttgcttaataattatttccggtgctctgaaaattcaagtaaaatttgagggctccttttaaaccaaggagaatttaacaaaaattctccgggccacattcgaatttttcttgtacgcattttagtgtttgccaatttctttctgaattttaattaattctattattccttttaaaaaatgatttttatttcgggatgaatttatcaggacgtgacatagcattagggaaaggaggaaacaggaactttcgcaaatagttttatttataaaatatgtccttaggttttatccacttggcttatcctacagtcgagatggctctgataccagcttgtcgcgaccgagaaaattgccttttcccgaacgctagtgtattaatccccgtcccaggaaaagccggggtacaccaaacaaacatgatataaaaggcacatctttattatatcgataataaatacattattacaaaggcacttcaggcctgacaaacaaaaataaacagcagcggactagcgggcctacggctccatcttcacaggcgctcaactggggtataagccaggactccacctaagacatcttctccgaagcttctcttactgaaggggggagaaagatagagcaagaatgagtacaaccacagtactcagcaagccacaccggcagatgcataattaatgcaagggagtacaaggggataataatataggggttaagttttgcagtaaacagcatttaaaagtcacttagttgcccaaagccattttataaagacgatcctagagctacacaaaattattaatcaaggccgtgaaccctcacgaacctgccttaacccaaggcctacgatgattcagactgaactggcaacccgaccctgggtcccagctcgtcccaagccaacccaggccaaccattccacattttagttattgagcaaattttaagaattaaaacactgacttgggtacattgctcggcttgcccataaccgagggcgcggctattcgaatagattatactctgatcagaggtgtacatctttacccacaagacacatcttcctcacgtgtaaccacgtgccacataccaccacggtatacggacggaagacgtgacatagtttccaacccatcctagccatagacaagagtaccgaccaaaccccacctacggccggaacccccgggacaggcaggcaggattgagccccctagcagcaggacaccggccctgtgccatgacatctcgactaccgggccgcagctcgtgtagccttcatttgtcctagagatgtccatcgacccccgacttcgtccatctccatccgtgtacttttgtttataaccagactgagccacaaactaagccttacccactagacatgtggaagtacggtagtgctttgcaacagaggcccgagcttaatccttatagtggccggggtgctacttcccacaactggcatgcacccaaaccccaccgaaaaacaggttttaggggctttgaaagaggaagagaggggtatgtccaattccaccataatccaacaattccataatgtccaaatgatatgagatttcccaaagtctaaagttataaaaccacctaatgttgcctaattaaccagcgaagcatctacctaagttcacactagtggaaccataaatagagtacccactagttggggttttattttcctagggtgaacaaggtaataataacaatagcaataataatgtcttaacaatgataaataggcatggctaaataaaacagtgataacgcgggaatttaaataaagcagtaatgcattaatttaaatcaaaataattttataaactgggattcaatatgctcaaggatgatgtgacttgccttgctcagagagaacggccttccgaacctttggcgacgaccgcgaaccacacttcgggaacctccggaacgacgaaagctacgcgaagcacacaagcaaagctacaagcctataaagaagcaataacaacacataaaaagaaagcaaacagttctttaggttataacaaacattaggagacttgaacgggtcgattcagagttcgtatgaccaagatatgttcatccgaagtttaatgcggttatatggagatttgcggattattataattaagctttgcaactataaaacatgtggaagcgctagcctgaaaaagacaggaaggctgcgctgttgacatgcggaccccacatgtcaacctaaaggaccgcggtagaccaggtacacagagacggtccacgggtcgacggaagcggaccccgtgtgtcaaccgaggcgagtagccgacaaacggactccactagacaccacgcgggctgcacacgtggaaaccacgcggctaccgagcgaacacactaacacggacactacacggtcaccacccgctcacgtgaacgactaccgacaccggtacacgggtaccggggtcgacgaccgcacaacgggtacggggcgacaccaaaaggatgaggacggggcagcgagaggacggatccttaccaccacgcgacgaggcgtgggaacgacaacgacgaacgggcgcggcggacggcgagggaacgacttcggcggcgatcctgggacgaaggcgagacacggccggcacgaggcttgacgacgcggaggcgaggacgaagacgacgacggggctgctgcacacttgacgaaacgcgggcggcggacgagaacggcttgacggagggacgaacgccacaacgaccgggaacgacgagaggacgacgacgacgaccggggccggcgaggagacgacgagggcagccggcagcggctgcacggaggcgaggatggcgtggaacacaccgctgcgatgccgacgacggaggcggcgccgccagacggcgagccggcgaggatgaacggtgaagacgacgacggacaccggcggtgttcggtcggaggggaggcgaggccgaggacgacgtcgcggctgcgatgccgaagatggtagaggtgcagcaagccgacgagccggggaggaggaaggggcggccgaaaggacgctggcgacgaagaggatggagaggccggcgcggcgacggcgttccggcgaaaccgaggagcagccggggtggagggcgatgcggcgacgccgagggaggggacggcagcgccggctgatgcacgggcgcggcggaaggggctgccggaggagacgtcgatgaggaggaaggagaggctggcgcgggcgacggtgttccggcgaaattcgtgcgaggaggaggtgatgccggggatgagggcggcgtcgcggagccgagggaggtggtggcgacgtcaaccggcgctcaggcagggagacagaggcgcctggaggcggccggcgcggaggaaagggaagggcgacggcgggaacgcagctccgggggtctccgcgggaaacggagggcaagccggggaagaggaggcggccgcgatgctggaggaggcgacggcacggccggccgacgtgctgacgcggcggcaggggcggctgaagacggccggcggcacgggagagaggggacgacggcggggaggtggctagggaccacgggagagctcgggaggagactaaaacggtagaacgcaaagagggggttctattttatagggtgggggagggagccgggcacgggagagggcggaacggcgacgggaatgacggccgacggccatggaaagcggccggacttggcgcgtccgttcccggcgattggggcaccattcaagggggaattaagggggaaagagagaggagggaaaggggattaattccccctaatcaatttgggaatcccatgcttgaatcgcgcggatttgagggaggaatggcgctagggttcacgggagagggagagaggacggccgggcgggaggaggacgatgacccggcgcgtgggacccaccggtcaggcgcgcggtcagcgcacgcgcggcgtgcgcgtgacaggcgcgtgcggcgtggcttggggaggctcggctgggccgggacacggcccaggcgggagggggcagggcggcccgggaccgggcaggccgggaggggagggaggaacggcccgggagagagaggggagggggagggagagggagagaaaaagagggaggagagagggacttcggccgcgggccgagagagagagagagtggactttgagccaaacttggcccaaaggaggaaggaaggttatttttaggtttttctttttactaaactttgataattgtttttgttgcttaataattatttccggtgctctgaaaattcaagtaaaatttgagggctccttttaaaccaaggagaatttaacaaaaattctccgggccacattcgaatttttcttgtacgcattttagtgtttgccaatttcttttcgaattttaattaattctattattccttttagagaatgatttttaattcgggatgaatttatcaggacatgacagttgggccacttttcggtgaggttcggcacctagtgaagcctaggccctcctgccagagatttcgtctcgcccgcactgccttctagcgaagtccttgtctggtgatgtccgggtgtccgagccatggccttcgccatgagactctcgcccacatggttcccttctcggtcttcgccgcttacgtccggtctgggcttgtcgcttgaatccttggtttcggctggtccggccgaaggcccttcgtggtatgcctccaacacacacatatatacacacacacatacacacacacacatataataaatttgtttggtgctccatggtgcccgaccaccctggttgaaattgagtatatatccaattcgaatgagtatgaaactttttcaaatatttaggtattaacattaactactttactaactagttccaagcaagtttgaactgaatttgaacttgtttttgttagattttgattctaggtatatagcatccaaacatataattagttaggtacgtaatcatagattgtgaaataaagttaagcttgagttgttttgttgatagatataggtatgaatcgaatacttataattagatatatactcacaatttgaaaattttgaaaaatttggacgaatttgtatatttcataccatggtgcacaggcaccatggtatggtgccccatatgagtgtcctatatatatattattattattatgtgccatttaactagggttccatggtggcgggtataaagatttaaattgagtatatacctaattcaaatgagtatgaatttttttaaaatgtttaggtatgaacattaacttttttactactttgtaattagttcaaacaagtttgaactgaatttttgacatctttttgttagattttaatgtcaagtatatagtatccaaacatataattagttaggtaagtaataatggattgtgaaataaagttgaatatgaattgttttgttcatgaaccaaccatcggttctatcgtcattatcattgcttgtaagacacttgtaaaagcttggtaagatgcttccaatttctagcctccactacaacccttgttccgtagttaatagagataatactttttttttgttgttttttgttttctactcacaatggcagattacaccactcgtgggcatgagataaagttagatgagacacaaaccatagttgctacatcatcttccataagtgcagataatgtaagtactttgttacataaaaaatataagtactttagtgcaaccagtgccatgttttcaaataaagaaagcgaagcaaaaacagtgccacaatttatttctagcaaggttcatggttaagcatagatcatgtcgtgttatattcgatagtggtggaagttgcaacaaccttgtgagttcagatttagttgagaaccttgggttgcctataaaaccgcatcctcatcgatattacatccaattgttcaattcttttcgtaagtccaagttatgtagaattgtgaaaataaaattttcgaatggaagttaccataatactgcaaattttgatcttgtgcctatgcaagcaagttctctattgtttggtcaaccatggatatacgataaaatgttttgcataatgatattgttaatacataatcaaatcaatgatattatatatctgggatgatactaatattgcgatgctttcaactaagcctgagttattatgaaactaatgcattgttgtacctctttctttggattctaatattttgcaggtacttgagaacaaccaagataatgaggaaacaaaaaagacgtagagaaagaagacctacccagaaccgttgttaaccattgatagttgaggaggctccatgcatgtttgaagaatgtttaattaaccaagtgcctataatttttgaagataagaatgaaggtaatgataatggtgctagatttactcaaggtatgtatagtaatgacgtgctaaatatatccactatttatgctatataagagcaacccatagtgaaaacaattgttgaaatacctttgtcacaaaacaatttgcttgatgtttcttgtgatgaagaagagttgtgcgatgcttcacttatatccatggcacaactagtgaatgagcatgtttgttattttgttgaaccatcatgtgttgagtttaaacatgttattcacattgctggcgagaatgaagagtttaaattacaatcttctttaaatacttggggctatattcaatttgataatctttgtccactcaattgtttagaggtgaaattatttgctagatctgaattgccatgtccttctcatgtgatttaccatgttgttagcaattatgatagtaaagcataatataatgtgcatcgagtatatatttgttcgaaattgaatatacctccttttcatgataagatgtattgtctagagaaccacatgcatataagtaattctgtatctagttcctctagttgtttaaatgagttatatattggtttgcaaaaaagggagtgttgtggttgtcggctatcaagattttagaatccaaccatatggacataaagaaatctaactcacctggtgttgtgataacaaagataagttcaataggttcaatgacaaggtgaaaccgaagacggtttccaatcaagaaggtgaagatgatgaggacacaactagctcagatatgactatgcctatcttatgtattaatcaacaaaaggtgattatgttctatatatttatttattatatgtttgaacaaacattactacaccatgtgtttttgtatcttttcatttgtagaggtacttgcttgggtaaaagaaataagaccaagtgtaaggaatgcatggactatgaaagaaattgattggcgaccaaatcaagaccttctacaagtctactcctacctcaccacatcacttttggtccatagaaggcaagagatgaagttctgcacgttctgtattcggattcgggcctcctgatagcattaactttaaacagacctagccgctgatataaaatgaattttgaggctcatgagtgcttcttggaaaacttatggaatccacttttggatggttttggtcccatgtcaaaattcctaccgagctgtcgagaatctgcaaaacaagccatatacctcatccagtccgaatatgatttgcgccttcggacatgtgattgtgttgtggacaaaacccatggtggtgtacgccctagggcaaccctaggacatcccaaatcatatttattcattagcatcatagtttagagttgggttttacttacattatttatgctattgcagttttgcctcatcttctatttgtagaaccccaaattcgagtgtttagctattcatatacaatcgagttgcaatctaccttgttcttgcttgtgttcttcgatttgcgtgcaggaattagccttttcggtgaggtcaaccaggtagtgcatggttgataactataggaaacgtggtcctacgattgcatggttcggatcgtgttgatcggaagccagttcgtgtgtgtcaagtttgcaccaaatcgagatttatcaatacctattggaagatcgcgacatatttcctcatcaccttggatagctctccccctcggcctacaaaatggattcctctccctccccactttccctttttcccatcctgagctctattgacgcttccccactctcctcctctttctcctccaaactgggcatcatcaagccgcctgtttctcctcgttagcgcatcgctttgccgcgccgccacctccctcagctccatgaggacgagctcgatccctggcattgttcggcttcactaggaggccaccgcatcactgcctccttgccagcctctccatcctcctcgccagagaacctccagctaccctttcttcctcaccgaagcaccgccctgaccttgttgttcctttgtctgcaccgcagcaccaacttcttcgatggtctcaccttcacattgcttgaagatcgccgtagctacgccgccaccatcgactagtgccatctccactgcttcaagctcgacgtcggcaattcttgtcctcccctcgtcgtgttgcgcatgttggtgagcccgccatcctttctcagttttccctcgccgtcctcaacagcgccgcgcgcgccagcaaccttccgtagccatgccactggtgccggcctcccgcatgtgcattccctatggggcccacccaccggtgtcctccggaggctaatgtgtgggtccgattgtcagcacaccccaacccctctgtctctctctctctctctctcgctctctctctaccccctctccctctccctctagctgaaggaagcatcattattttattaagaaaaataattcaacaaattcaaaaatatccatttaaagagcacataactttcaaatggtcatatcttagccatttgaactccgaatcgatccgttgaagtctctaatttttccttataatgccaagaacctatttttgtgccttattgtactgtttttgtggtttttcttaccctagtttgtttactttgcgttgtcgtgcaaacataggtgcagttctaaaagatttgttcttcctcatagtggatcacgaatacgttgtgagcaatcaaggcaagtcatatcttacccttgaagcatgttgaatcctacaattgtgaaaactatattgttttactactattgcattacttttataaattgcatcgttcacttgttatattagttaatattattcctatgatccttgttatagcgttattgatttgatatccatgtccttgagaaccctaggcaaaataaattaactagtcaagtaccctatatgttggacttactagttaccataggtttatgcttaccatgcttagattcagcaatagaatttttgaatgaattggggtgctgtggtatccaccgaatacttgattacttgttggaccatcaactgggcagttggtgagtgggacaaacgatgtttctttgtgaaaactgaaacttgttttggggctctctcgggcatctgttgcaaagcctttccgtacgaccacaagtctatgggtaaggcctgatcgacagtttagtgcatctcaaaactttggaccaggggtctatcacagattgagtgtatccactcgcaattgctagtcccaacctgtcgaccaagggcgttgtgtgagtgctttagtgggttccaccgagggtcaccatcgggagtttcattgttttgtggtgaattacataaaaggtcttgacatggactccgtctgagtacctgttgatcgtgacgcatggaagacatggcgagaggacatgccttgtcgttagaatctattcaacttatcacaccctcagttatgggcatgcctagcaatattactccaagttggccttgactttttaaaaaccttgggataaaggaatcataatggatttaagatggtgaaacttgagttggttgtgctgaagcgcagcctcgtgaactttataattatggcttagattaagatcatgttttaaaatatactttgaacttatgaactgtttaaactttggctttatgaaaaataaaccatattatgacattcctttgttatccctatgcattattgtacttctctagtattgcttgttgagtactataagtgatactaattctagctcacatctaattcagaagatggatgctctagagaagaaggcttggactactagctcttacctccgtcgagtaactgtggttgctgcttctgtaggcatccgctatctttttgtttatcattgagtgtaaggcctatgcaccttgcctcctgggacaaggaataatgcacgcacgtaaggaacgcccgttgggttatttccggtcgtgacaagttggtatcagagcccccttgaccctaggacgagccttagatcccaagccttagcaatattttcgaaataaaaatcctttcttatttgtgaaaatcctctagtctctctctgtcctgctgcttcatttatcgccaaaatctaatctttaaattgttgcttttctcttttgttttttttgtttgtagatggccggcagcatcaaccgtcgtggtctggacctgactggcttcgttttggagctgcggggcatgtgcgttgtcttggggtatccgcatggagtggactaccagggcaagcaactcccggagcaggagggtgatgatgcagagccccacgctacttgggaggtcactgcagtgatcctcactggctcacccgagaggacttcgttggcagtcaccgtgggtggagattctttctccgccgcttgctagaacgccgctctcctcgccattggcactctgcaccagcgctacctagacgagttgcagcactcgccctaccgctaccaccctcgtcgcggaggagcccgcgactacgccaccttccgggatgctagctcggaggatgacgccaccatcatgcacctggcgcgcatggtggaggcttacgacgcggctcgtatcgacttccatcatatggtgcgtcgtgggttggtcgagaacaacatgaagatcctggagctgcgtcaggagaatctgcagctgaagaaggacctagacgcagtggaggcgcagctgtgtcagctcaagatcgcccagggagaggtttgtcgccccaagcgccgtcgcgtctgccgcagcctgaagatcaccgcccgcaagagtacctccaggcccgaacttgttcgtcagtccctggcgtggacctgcttcgtcgagacccctcgtgccgagcccgcgcctgtggttcctcaggaggagggagcctccggcgttggcagcacggaggatgcgctgctgctcaccttccgccctggcccgtcgcagaagtagacgagcagttagtaggcttgcgcgtgtgttcttctcgtttgtttttctgccagagtcgtgtggggcatggttataccggtgtgtggtataactgtgtcggagcctgtctttattttatttgcttaagcaacttgaaccttaatgaaccaatttaatagcagtaataaattcaagaattatggtagtcgtgggtggttagttttaatagtcagctctctctgtttgccggttctatgtgggattttcagatggtgacaaccaggagaagtgctactaccggtgatggcaaccaacccgaaggtagcaaccacaacaaccatggcagcccacctccgcctcctcccccgcctccaccaccaccaccagacaccaactccatcctcacccaaatcctcgcccagcaggccaacatgatggctgctttcctccaccacatccaaaatccgccacagcataatgctccacctccaccaccacccccgcaacactctaaactcgccgagttcctccgcatccgtccgcctaccttctctagctccaataaccccgtggatgctttggattggttgcatgccgtggggaaaaagttagacaccgtgcagtgcaacgatgaggagaaagtcatctttgccgctcaccaactgcaggggcccgcatctctatggcgggaccacttccaggctacgcagccagaaggacagcctattacttgggcccgcttcaccgccgctttccggaggacccatgtgcccgccggagtcatggcccttaagaaaagggaattccaagagttgaagcaaggcaaccgctctgtgatggagtatttgcatgagtttaacaacctggcccggtacgccccggaggatgttcgtgaagatgaggagaagcaagagaagttcttggcagggatggaccctgagctgtccgtgcgtctggtctccggggattatccggatttccagcgtttggtggacaagagcatccgcttggaagccaagcacaagaaactggagtcgcacaagcatcgcttggcaaatttctgcaaccaacagggggctaaccaaagagtccgctacaccaatccctatccagggggatcctcctcgcagcagcaacagcagcagcaacctcactccgcgccccgagctcaattcgtggtgcgcgttccacagctgcagcagcagcagagtcagcaagggacccgtgcgccccgtcctcctacgccagccgtgcagcctggacaaggccgcagagacgttcaaggtcagcagcgtctgtgtttcaactgcttcaagcccaggcactttgcggataaatgcccaaagccgaggcgccagcaaggccaagcgcctccccgccccaacaacggtggtaaggatgtcattcggggtcgtgtgaaccacgtgactgccgaggatgtgctgacaactccagacgtcatcgttggtacgttcctcattcattccatccctgctaccattttgttcgactctggagcttcccactcgtttatatctgtgccattcgtggggagaaatcagttgggggtagaaaggcttaggaaccctctactcatcaccacccctggaggggttatgacagcaaagtattatagccctgccgttcctatagaaatccagggaattccttttccctcgaatctgattcttctagacacgaagaacttggatgtgatccttgggatgaattggttggctcaattccaaggagtagtggattgcgcaaacgcactgtcactctgtaccgagggccggaacaaccggtagttttctttgcacccccaacctctgtcggcagttcggaacttcatcagataggactgtcggaaacccccatcgtcagtgagttcggagatgtgtttccggaagaactacccggtatgccgcccaagcgagagattgagttccggatagatcttgctccaggaacaactcctctgtacaagcaaccctaccgtatggcagcaaatgaactggccgaagtcaagaaacagttggaagagttgaaagaaaaggggtatatacggccgagcacttccccctggggtgctcccgtgatttttgtggaaaagaaggacaagacaaagaggatgtgtgttgactacagagctctcaatgaagttactatcaaaaacaagtaccctcttccccggaccgatgatctgttcgatcagcttaaaggtgccactgtcttttcaaaaatcgatcttcgctccggatatcaccaattgcgtattcgtgaagaagatatcccgaagaccgcgttcaccacgcgatatgggctgtatgaattcacggtgatgtcgttcggtctaactaatgctcctgccttcttcatgaacttaatgaataaagtgttcatggaatacttggataagtttgttgtggtcttcatcgacgacatcctggtgtactcgcaatcagaggaagaccatcagcaacatctccgtcgggtgttgggaaagttgcgggaacatcaattgtatgccaagcttagcaagtgtgagttctggttgtccgaagtcaaattcttagggcatgtgatatctgctaaaggagttgctgtggaccccaaaacagtgaccgccgtcactgattggaagcaacccaagacagtcactcaaattcacagctttttgggtttggccgggtactaccgaaaattcatcgagaatttctccaaaattgccagacccatgacgcagttgctgaagaaggaagaaaaatttgtgtggagcccgcaatgcgagaaagcgttccaaactctcaaagaaaagctggtttcctcgccagtgttaatcttaccggatactcgcaaggacttcctggtgtactgtgacgcttcgcgccaaggattggggtgcgtgctcatgcaggaaggtcatgtggtagcctatgcctcccggcagcttcgtcctcatgaaggcaactaccctacccatgatttggagttagccgctgtggttcatgctctaaatatctagcggcactatctcattgggaatcgctgtgaaatatatactgatcataagagtttgaaatacatcttcactcagtcggatctaaatcttcggcagaggagatggttagaactcatcaaggattatgatgtgggaatttactatcatcctggtaaggccaacgtggtcgccgacgctctaagtcgaaaaagccgttgcaacactcttggcgtccatgacattccaccggaacttaatcaacagatggaagccctgaatctaagcatagttagtcgtggatccttggctatgctggaagccaagcctaccttgctcgatcaaatccgcgaggctcagaagaatgatccagatatgcatgggatcctcaagaatatgaaacaaggtaaagccgctggtttcacagaagatgaacatggaccctatggaacggaaatcgtgtatgcgttccggacgacaaggaacttaaacagctgatacttcaggaagctcacgaaagtccttattccatccaccctggcagtacgaagatgtacttagacttgaacgagaaatactggtgggttagtatgaaacgggaaattgcagagttcgtggccctttgtgatgtgtgccagcgtgtcaaggcagagcaccaacgaccggccggacttctccaacctctccaagtaccagaatggaaatgggatgaaattgggatggatttcatcaccggacttccaaaaacccagggcggatatgattctatatgggtagtcatggatcgactaaccaaggtagcccggtttattcctgtgaagaccacctatggagggaacaaactagctgaactctacttcgctaggatcgtgagtctccatggcgttcctaagaaaattgtatctgataggggaagccaattcacctctcacttctggaagaagctccaagaagagttgggtacccgattaaatttcagcactgcgtatcacctgcagacagatgggcagaccgagcgtctgaaccagatcctcgaagatatgctgcgcgcatgcgttctagatttcgggaagacctgggataagagtctcccctatgccgagttctcctacaataacagctaccaagccagcctacaaatggcaccctacgaagcgttgtatggacgcaaatgtcggacaccgctattgtgggaccaagttggggaaagccaagtgttcaggactgatatcctgagagaagctgaagcgaaagtcagaaccattcgggagaatctaaaggtggcccagtctcggcagaagagttatgcagacaaccgatgccgtgacctggaattcgcagtggatgactttgtgtaccttcgggtcatgccattgcggggcgtacacaggtttcaaacgaaaggaaagctcgcacctcggttcatgggtcctttccgtatcattgctcaacgcggagaagtcgcttactagttggagctgcccgcatcattgggcaacgtgcatgatgtgttccatgtgtcgcaactcaagaaatgccttcgaatgccgtccgagcaggccgactcagagcaaattgaagttcgcgaagacttgacctacgtggagagaccggtgaaaatcctggacgccatggagcgcaggaccaggaaccgggtaatccgtttttgcaaggtccaatggagcaaccacgctgaggaagaagctacttgggagcgtgaagacgagctgaaggcagcccatcccgatctcttcgccagttcttccgaatctcggggtcgagattccgtttaggggggtaggtttgtcacgtcccaaaacgaccctaaaatatatcatctaaattatgcctagaataattaaaatccgtgtgaaagcctccaaaaattaaaatgtgcaaagttaaaagtcaaataatgcttagaggatttttgtatatttcctaaaagcctaaaatacgtaaataaattttagtggaattttcagagcacaaataataattgttaagaaataaacaaagttaaaaggttttataaaaagaaaaaccctaaaaagtcccccttccctcccttgggctggcccggcccatctctccccccccctctctctctctcctctccccacggcccatccggcctctccccacgggcgcgccgcaactcggttaaggaaaatatccactttccaacccttcctttcaatattggagccgatagcatgtacttgacaacgtcggccttgcatataacagtacactcgttggacagtagataatgcctcaaccttgtacacgaaaaatacagacacaagcataacttctccacaggggaatatctagtttctgcatccaagagccgacgactgagatagaatacaactcgttccttcccttccaacttctgaatcaagactgagccaattgacttctcaccggccgataaatataacctaaacggtattcctttctgtggaggaatcaaaacaggaggagagctaagatattccttaatattatccaaagacttttgctgctctgccccccaaataaactgctgatcggttttcaatctcaacaatggtgtaaaaggttctaaccttccagacaaattagaaataaaccttctaacaaaatttatcttgtcgatcatctcttgtaattctgtcttattctccggaggctgaatcttcttgatcgcattaacactcctttgagttacctcgatccccctctcatgaacaagaattcccaaaaactggccagccgatacaccaaaagcacattttgtcggattcatcttcaggccatattttctggttctctcgaaaaccttcctcaaatcagctatatggtcctctagttctttagacttgataaccacatcatcaatgtagacttcaaccaaccagccgattagatcatgatatatgtaattcatggctctttgatatgtagctccagcactcttcaagccgaaagtcatgacaacccatacaaataagccgattgcaccaggacacctaaaagctgtcttatgaatgtcttattcggccataaaaatttgattgtatcctgcgttcccatccataaaacacaaaattttatgccccgaagcagcatcaactagttggtcggctactggcattgggtattcatctttcggggtggccttattcaaatttcggaaatcaatgcatatcctgaccttgccgtttttcttgataacaggaattatactagaaacccactcagcatatcggcaaggacgaataaaaccagcatcatataatcttttaatctcagccatgactggttcaagcatgtcggccttgcatctcctcggaggctgttgacgtggcctaacccctggtttgataggtagccgatgttcaacaatcgatcggctgagtccaggcatctcgtaatactcccaagcgaagcaatctctaaactcttttaagagctctatcagcttggttctaaactctggagataagttcttactaataaatcatcggccttggccgatcgcctggacctatgtctacttcttccaaatcatcggccgacatgaaaccttgaccttacttgtcatcgagatcatctaccgtgtccttagtgtagacatttgaaccctccacgacgccctcaaaataatagcttgggttctccatgttcaattggctgtatatcagaatcggatacttttagaaaatctccatcccagacttttccagataaacaatcaaggtaatccatctcccaaagagctaaatcggcactggcaacattaactgacctgtcggctggcacgatctctattttgtcgccttgccactgaatcaaacattgatgcatagttgaaggaatgcaacaattggcgtgaatccaatcccttccaagaaacaagctgtaagaacctttcccatcgatgacaaaaaatgtggtaggaatagtcttactgctgactgtcagctccacatttagaacacctttggtttctaatggattgccaccaaaatctttgagcaccatgtttgtcttgatgacatcctcggcatttctacccaacttcctgaacgtagcatagggcatcaaatttaccgcagctccaccatcaaccatcattttagacatcggcttcctattgacgtagccgtttatatacaatggtttaagatgccgattctctgccccctcgggtttctcgaacactgcctgttctggtgatggaaccaacttagccgattcctcttccacctcgtcgacatcggcttcatcgatcccgaattcggctggcagggtaaagaccatgttaaccggtgctgtcacaacactcttcccttttgccaacctctttgcctcatcggctgcaacatcatcggctataggaacttgattcttaacacgccactcttgccttggctttgctttcttcagccgatgattaacttcttgttcaacctcctgaaggcgctccttgttcctcaatctttgaacccttcgcttctgattcttcgtgaaaataccagaaggacaccattgagtcttcctgattacattttccttttggccatgatcttgatttactggacccaacctttgatgaatggaaactctcgtctgccttagccgattgcccctattatatgatcgacttgagctctcgacgatatcactgcacccacggctgttttcaatagatggcaacctcatcccttcattccagcagaatctaaagaactcacaaccccaatgaggatcaaaaccatcatcgtatttctcatgatgcttctcctgctgcttgtcatacttcttctgatatttgttgataatcttagccgaattcacctaaaaaccccttgcacgggccttgtcggctgtttggccagctgtatgcaccatattaacaggaaaagggttaccatcgaccttcatcggctttttggagtcatcaatcctaatcttgcctccctcaatggccacctgaatctgctttctaaaaaccttgcaatcgttagtagaatgggacccagaattatgccatttgcaatacctctttttgcctaattccttagccgatgggattgtatgaccagcaggaagttgaatttgcttctctcggagtagcaatcaaagatcttgtcagctttagtaatatcaaagtcatacttctcctcttttccagaactttttacccattggcatggtatgacctttttactcctcacccactcggctgcagctatttcagaattgttctcatcatcatccgacccatacatgtacggacaaacatgattaaccttcttagagtttttactaacttccgcagacctatgctcatgcaaggttactttctgtatcagatgtgacaagctatcaaagtcttcagacgagaatttcttcctaatcggagcaatcataccctgaaaggccagatcggctaactgggcatcagttaaacacaagctaaagcatttgttcctcgtctccctgaatctctgaatatactcgtgcacaggttcatcatgccactgcttaatcgctgtcaaatcagataatttcatctcatgaaccccactatagaaataggtgtggaattgcttctccaaatcggcccagctattgatcgacccatacggcaaagaggaaaaccaagtaaaagccgatccagacaaagataaccagaataacctaaccttcagagcgtctacagcctatgcttcaccacactgagctaagaatcggctaatgtgctcataagttgacacaccatcttgtcccgaaaatttggagaagtccggaactttgaaccgattgggaagaggaactctctcaaaccactcagagtaaggctgccgatacaagcttccagtctcttttggtttaagcccaaactgttccctcattatgtcagcaatcacatcggcccacggttgttgctgagctaccccttgtgactgttgctgcatgggctcgaactgaccgtattgaggcgcaaactgaggttgagccaatccccctggctgatattgggcttgcggggaaggagactgatattgataattcaagttacccccttggtaattatgaaggttcggctgggtattacgtaccaaacgctcaggaacaacttgaggtattactgtgccatccggctgtatgtggtgaaccaagtgttatgggacaacttgatttgaaaattgttgtacaagctgaccaccaggcgttgcaaacccggccgatgcgcctattgaaccttggtgctagatcggctgaacgatatgctgtcttaacagcgtctactgaatcggctgcagaggctgctgtcttggtggtgtttgctgaactggttgcatgacctgttgctggattggttgcacaacctgctgaattgggggcgtctgctgaatcggctgctgctgtattggatcaacaatagattgaggtggcagaaacgtggcagcaacctgatcttgggtcagccgattcacaacctgcccgccatgctgtggctgctctcttattaacaaccgagggttcactggctggcctagcgccattgctgatggaacaggtaggggagttgacgccagtgccgtcggctgagatgttggtgcaacggagggaaccgcctgagttgatggctgaacatcgttaatcaaagaccgataatttggaaagacacctccttgcaaataaaccgggcctgcagcctgatgctcagctattgaaccatcggctatggacttcatcatgtttgataaggtattaactaacaccccagattgattgatcaaagcatgatgcacagtgtagtcaacccgatcttggaaattactgaaaaaatcttgtgccgcatcactattctgattaagatttcctccttgcaacccctcggcaccatcaccttgaactccatgcaccccgtcaccttgcactccatggactccttgagaattgtcaccttgatttcctagagagctgtcggtagcacttttgttactcagctgagccgagccatctggagcttgtttcccatctccatccttagaagaactggtccccggatcatcagcaaccacttttattttgtacttctgaacaagtgtcccctttcgggtctacatgaatgagttcaagaactgatcctgtgcttgctgcaacattgcttcaaactctttctctgctcaggtgtgaatctttctggatcgatcggcacgacgtttccttcattgacgtcaaacaaccctaatttcagcaccttttccttaacagagtctgggctagctggggatggtggtggtggttgtttctcggccatgaggacgaattgttggctgacttcttaaatgtcccaccgggcgtgccaaaagcgtgttgacagaaaacacgaagcctgggagatctgcttaactccagtgcaggtccaaagctcgccttcgaatgtatgagcgtgccagttgatttgatcctgtaatcaacaagaaatagaagcaaagaaaccacagttaaatctataaatgatagccgatcggctaggtgccgatgacacatcatttatctttgagccgatgtcatatacgaatcgatcggcggttataaacagatagtaaggaactaaatctattcgatcggctgtagatattaacgatatatagttcttatattaatatatacttaaatcaagtgattgggatagatcggtcaccatgccgagacagtataaatcacttagatcgaaatatatattaataacaggattatatatgtttatagcatagccgatcagatagatctagcgtgtatcggctaatactccgatactactctatatcaagatattaaaacaggtataatgtattaaacagaagcttaatatatttagattgcgacattatcttgacacaaagggtggatttaacatgtcattgaagcatatagatcgaatatggttaaatcagataagatcggctcaaactccgatactaccctaatcggcaaccagagtacaggctagagattgatattctaagcacgacttaagacatcaaactcaactgatgcagcatgaggtatgaaaagaagaacaatatctagacaatcaagccactggaagtttcatagagtggtagatatcttatataatctaggtcaacgtcactatttaaccaaatcaactgccttctggtaacagatgttagccgattgtaggttagatcatgatattgtcgaagattatctaagatatatgataacttgatgaattacatagacaagattagagtaccataaagatggaagcactaattccgagaacataattcatcataacaagttttacctcttgttgaagatcgaaatcgatgcagctcaacccgaaagcaagaactcgtcaaaataaaactaaagcaaaaaggtggcgatgcaccgagattgtattgaacgtgtgtgttaaaagttacatagggctcgggtctatttatacccgagaattacaagatatgtccaaaacggacacgactactatctctaacaaactcaaagataccataagtctttgcggcagacttttgcccaatcatatctctaaggaaattacataaaacatcctaattactagatacaattgccttctcaggactctatccatgtgcggcaatcaccttgaagcgcctcaattcaacccgatgtcatacatcaagttgcattgtcggaatcggttgcatcggcttacctagcccgactcaaacccagccgatcctaatcgtagccgatctggactctagccaattcctgctctgtttcctatttcgatctccgcctccaactttgcttcgatctaatcttctttcccgatgcagatattaccaaatttggttgttaacacacgtgtgaagtctgcggcggcacgggtcattctgggaatgattgcccggaaacccgtgaggaggcgatgtacatgggcaacaacaacgggtaccgtccacaaggaggtcaggggtggaaccaaccacgctcatattatcaaggaggtaacaataacggtaacttctctaaccagccctccttaaaggatcttgtttttgcacacgccaaaactactgattcgctaagtaaaaagcttgcagccaacgaaaagatcctagagaacaaaaatgtcaaattagatggcttcgcttccacatttcaaaaccagccgagcttcaataaaatgatagaaacccagttagctcagttggcatctttagtccttgcaaatcaatctgggaggattccagggcaacccgactcttccattgaaaatgtcaaggcgatcacgacgaggagaggtaagtccactcgtgatccaccgtatcctaaccctgtaggaactaatggggtgacaaaagaagtgccatctaatgactcggctgacaaggagattcagccagaaaagaccgtgccggaggattactgcgacacgcggctgctgccattccctcaacggagtaggaaaccgtcggtagacgagtagttcgcttgttttgttgaagtaatccagaagattcacattaatgtgccgttgttggatggaatgcaagtgccaacatacgcccgttatctcaaggacatactcaacaacaagagaccgctcccaacaacgaaggtggttaagctgacggaacactgcagcaacatcatactccacaagctcccggaaaagaagaaagatctggggtgtcccacgatcacctgctcgatcggggcacaacaattcgaccaggccttatgtgattttggagctagcgtcagcgtcatgccaaaatatgtcttggacaaactcaacttcacggtgttggcaccaacaccaatgcgcctccaactggctgactcattagtccgttacccggctgggatagcggaggatgtgccagtcaagatacgtgatttcttcatcccgattgactttgtggtgctggacatggacacggggaaggagacgccgctcatcctagggcgtccgttccttagcaccgcaagagccaacattgatgtgggaacaaggagcatccatttccatatcaacgggaaggaggaaaagtttgagtttcaaccgaggacggaacaatgctccatggtcagaatcaagtacgggccgaacccgcagaatattcaagaggtcgaagtgaagccacccaagatggacagtctagtgaaatttatgcagaacttcctggaaaaggaaacaacaatgcccaggaaccgttattggaggacgccggtaaaatcacctgtactggccaagaaattagagcagccggctcagaagagaccgtcttccgcaccgaaatcaaagaaggtgtggaaggaaaagccaaaggcacccgctccaccacctccggagacgggtggaaaatccatgaactaaaacacaaggaggtactgtcttgcacgttggactttaaatgaagcgaccttcgccaacaggtaaattggtatgtatccgcatatttgctttcaacaatttgaatttttgcatcatcacatatttgaatttcaacattgcatttaggatttttgaattttgaggaaattcttcaaatgaaattttaagagcaaacaaaattaaaattttcaacaaaaatttactgtgccacgaccacaccgaccgttggaatccaacggccgaaagtggggccaattgggcccaccaggggttcggccgaacaccctggttcggctgaaccggccaggcaacggctccctgccacttttggtagggtaacggctagtggtccccatacgtcgattttgaccgttgtgggtgcactacttaagccaaccggccaggagaagggacttcaccccatttcaacacattttcattccctctccaaagtttgctctcaagatcattcaagctttgatagtttccttcagattaaaaacaaatttagttgcatatatacaagttgctttggtgaaactaaccggcgggtgaaactcttgtcatttctaacccccgccgagttagactattcttgctccattgtgcagtatgaggaggcgattgtctcgtctattcaaggggtccagttctccatcaagtcatcatggcgagtctagtactcgttcatcagctgatgtctcaatggaagacgccgacgctccgtgacaactcctaaacgacgctgacctcgaccttgtcagttatcgggagagacaagcgtactacatgctgagcgaccaggagtatgctcacacgagagaatactcaccggagctgctgaaaaagataggtatggatgttgaatttcactctatttggaaagctgttggttggcagagatttgctgtggtagatgagcctggttctcgtttgcttactttacaatttctgtgcactttgaagaaatagaagatggcatttcttttcgctttttccgtaaggagttcacgctcacatggaaaggtttgagtacacttcttggttttcacgattcctgtaaaatcgatctccagaaaggaatttctgggttcgagaaaaataggttttgggaagatatttctcgtgctctaatttgcaagaaacctagaacaaatgacatccataatcctacacttaggctcatgtacaaatggattgctatgactttgtttcctagaagtgatctgagacccattaggggagatgaattaattatcatgtttgccatggttagaaaaatcaaaatttctcctgtgaaatgtatgataaagcaatggttagaaagtataaaattctctgctcctgttgagtgcacttctctgattactcggatagcaaaagggctaggggtcgttagcgaccaaattgcttttatctcagccgctcgtccgcgtattgatgaggcttatctagtgcaagggcatattttgaaacatggagcagatggaacttcgatatactttttccccggttgtacaaatgaaatctcgttgccaaatgcgaatatcatttgtacaacttccataaactaaccattcccctgcagaccatagaagaatctcgtggaagtggaacatacagggagacgcgcaacatgacaaggaacgaacgagagagttcatcatccttgacacccgtgcagatgtatgaggcaggttgggcaccaactggggatgcacgcggatggacccaagctccacgccatagcatcggagtctcaacctgggcaagtgccagtgaggaccggtggcatgcgcctcatggcatccactggggggacaatcaaccctccagatcaagtggtgtgcctccatctccaagtgaatggcactcgagttcctcttgttgggacttgggtgaaatcactaggagaatggacacccttgatgtgcagacgggggagatccagtacaacctcacggaacacatagctcaaacacaagaatggctacaatctgctgatgctcagttcgtcaacatcaacaacatgatgcagcaacagcatggtgaccttcaggcgtactttcattatcaagggttcaatccttatcaaggaccctgagcgaaaaccaagcttggggggagacatgctccccccattgaggtaacttgtatcacattgcatattagctttccaattgcatatttgctttccaattgcatcttataaaattttgaaaacaacataaaaatttacaaaatagaaaataccaaaaagataggatagatttgagtcatgctaggtaagacaagctagttctctttgttgaaatgatgaatagttgctctgttttatatctctgatatatgggttcttggtaaatactctctcaaggattgaatataagtaggcaacaattatccgggaacctgaggtaaatgggccgcacttgctgatctaagtctaagcggttgcaagatatgagatagtaactaggagtagctatgatactgatactagtttgacttgaattccggatgtttttttttcccaaaatgataaattgagattttctcatttgatataaattcctaccagagacaaaaatgtgctatcatgattaaacagtatgcatttttgttgcttgacattccattgaactttgtcaaactcttgtgacttgtgttgatacttctcatgctctataatcaagatcatacacccacatatatgcacatgctaaactcctacactgggagctaagcatattccattccattttcatattaccaccaatataaattctccatgctttcatgtgttttctgctcctaaaaagaaaaatccttttgaagaaaaaaaagagggaaaggcatggttatgaaaaaaaaataaataaagttatgctccatcaagcatgagcatgatgttgaaaaaaaaatgtagccatgccctctcctaatcaataaaaaaaagatttttgggagaagaaagtaagcacaaaggagaagcattttttcttttatttttcctcatataccatttccactatataccacacacattatgcacgatcttgattttgagtatgtttagttatctgctttagtctaagtttttgacttagtaataaatgtgaatgcaagcgtgccatgtttggtctctaccgagctccacatataaaccttagagtaggaatcaaaaaggcatcatttggtgaggaattcaaattgatacacttagagggactaagtgaatcaattgaggaacttggttttcttttccaaaatcatttgaaaacttccggaataagagttgaataaagatcgggtgattggtgctctagttgttgttctgtctttcaaccgcccaaggcaaggagaagcagtgtctcgtgggaatcaggggtaagggtaagccaccgtgccaaagattatttaatctgagagagaatacatataccttgcacctgtatctttgagatatgcagcatagtagtaactcctgatcaacaaccaagtctttgtttcctttcgtccttcactcgggacaagcaaaggttcaagcttggggggttttgttgacggtcgttatcgatcagtttcgaccgtcaatattactaaaacaggagtgaactagtgatgcttgcaatgcatatatttgttagaataataatattccactagtattaggtttactaaccttttgcagagaatgatcataaagtggaggagaatcgacatcaacaccaacgataaatcaataaggcgatgtcgagaaccagacttatgcatgaatgggccacgaactcagaattgacacgacaaactgggccaaaattcacaagtctacgaagaggaacaacagaggaggctgctagctgagattgggctggatcgggccggccccaggttcggccgaaccagggggttcggccgaaccctccttagcgccatccgatccagggcttcacctggacggtgtggattagcccccaatgacagttgaagggcatttccgaccactccaaccgccacaaccatcattggggggctataaaaaagaagttgccattctcacttcactcacacaccttaagcaagagctctctcattcctctcaagtttagtttagtagtatctagctggtggaatagaaatagaataggaatcaggagtccggaagagttcgcgtatggctctagcagctttcatttcctcttttgtaagctttgtacttttattagaatactcttctatatacatttatgatattgaaatactttccgagtatatgagtacctactttacattatgttcttgttatattgaatgtacggctagcttatctgggagatgctttggtgcgggtatagtgtttgcttatgcaattactctatgtcatgacgataatattagagtagtatctggtagtttagacgtggtgtctagattacgggatatcattatttggggttatatattgcggatgagaggtaggccgctgatggtgacagctcagtaaaggtattcctccgcgcctatatataatcctaagttaatttcctggggagggtattcctccgtatttagccctggttggatggtcatgacgggctgtcgtaaggaactcggcagtcagaggtggcttctcgaagtaccaggagggcatcggatagagggtattagctagtatatcaattaactagaatgtatgtatactattgttgacgaaaaaatcgaacacaccggcctgggagatctgcttagctccagtgcaagtccaaatatgatgagatgcgggcgtgccagtcagtttgatcctgcaactgacaaagatatgcaaatagtagatcaaaacagccaatcggctgacaagccgatggagtagttccagccgatagtcgataatagccgatgtcgataccagccgatagcgatagggtttatgcactcggctatatgtccaatgtagataatgatataaaggcaatcggctgatgatgatgtaataaaataacaatataatccaatataaaccaatcggctagcaatgatatgataaataagcatcgatccaaaggttaaagcacacatcggctggaggtccgatgtcatgaaatccacaagattggattaaacagtgaaacctttgttgtcatcggctaaatccaacttatatgtatatgcaatcctcatgagccgatgcaacgtacagataactcaccggctgaaaccccgatgaaacccttattggcaatcaataagcaggctagagattgtggttctaagcacaacttagtagatcaaacttaactgatgcagcactaagtatgaaaagaaacataatatctagacaatcaagccgatgactgattttcagggtggtagatgcctatgctaatctaatctagcaatgcgatttagccgataccggcagaaaccctaaagcgagatatagccgatagagctaaattgatatgctaagattagattaacagagaaatatgataaataggtaggcaaatatatcatccaaaccagagcaatccaagaggtcgaatgtactgatgcagccttgaacgacgccgatgtagatgagacaattgcctgggccgacggaacattagatttaccccttcgccggagatcgaagacgatgcagccccgcgtcgggtgccaagttccgccggaacgtaaaaagcaaaagtagaagtaaaaagggtggcgatgcgccgaattgtattgatcgtagcgttagattacatagaccccgggtgtacatatttatacccatgggttgatagaagtcattgtcggacaagaaagaaactaacctaaagataaaaggaaaaaataaagtccttatcggacactaaactcactttcctaaagataaaaggaaactaacaaactatttttaattaatagataaactgtcatgccgcatcctctttaaactcggtcacttagggataagcttcctttagtagattgatttccttaaccgaatatagcaggaatccgactattggtgacttgataactcccataggctgattccgagatgttgcagccgataatgattctaagccgatgacgtctttgccgattaccaaatttcactgttaacaactatgtatattagaagtataggaatagacttcttttctcttttctttccacttagtttagataatatatgatgaggatgagtagttaaatgcttttgtgtcactctacccttggattatcttaacccctgattagaatatgattatcacaagtaatatataaattattagttgagttcgctctacatgatctttccacgggataaaataaatacgatacccttggaatactctcgggtgaaatgctacaatggtatatccgtgtgtttgctgatgaactctgtagccataatataccagatgtatttttgcgccattgctggaaattatatttctagtaatgtcgttaagaaatactaacaatgagtgagatagattgggtagacactagtggctgagtcatccatacaaaaaaacgggccagctcgatcggtcatcggctcgactatctcaggggtgttcgttttctaaaaaaaaaaaaggcacctataaccatatcataggtgcccgcttattaaaaaactggtttagatattattggtgccagtatttttaataaacaatcgacataagggattatatgcgccgatttctatatgtatatatgtatatgtatatatgtatatatgtatatgtatatgtatgtatatatatatatatatatgtatatatatatatatatatgagatggtggaaaggcgagcaaagtgatgtttttactagcacctacgaggatgtttcctattaggattttttatagtgtaaactcaagttagagatgagggacgacaaatggacttattcctattggcgttgtattggtgttgggtatgggcctcacattttattgggatggggtccccgaaggccagctctgtctaggattgctcttggaaatcaagtaggtccccaagcctccatgaacgcattctttgttcttcatctagaacctgaattcctcgtaataaatgaacgccgtcatgcatgctgaatctgctggcatgagagaaaactagaagtttttttataaaagaaaaaactaactagatggtttatattagggccagatctagaaaggattaacaggagggtctaaacaaactatacaaaagattatagtcctttttctaatggatgtatgacagaaaattttagtggggactttatgagggctcccatggttacaacacagatagtgggggctcaagaacccacagacccaccttatagacggtacgtagctgcgtctttggggactttccaccacgtacaatgcattacaattacgcttattattgcatttgcatgacctataaacttatttttcttatatctgcaggacctacatatgtctggggtgtgatacaacttacaagtgtactgtgttaaccatgtacggagtggcatgaatgcatgggctgcatgcatgcgcgtgaaacaggccggcagccactaggcaggcaagtagccgagagacctggtccagtctttgctcccgggccttccaaccactggatcggcctattccaattatatcgagatatttttctcactcatacatgcatgcaacgaattagtctgaatgcatgcgacattaccaatttgtgaccacctagcactagcagtaggtagatagcgagcgttggtgcgtgcgtggatggtggtggaaacgccgggtgtaaatatgtaaatgtaaccgagcgcggcagtgccaatgatgattgggggaggaacacatggccatgccccgcgcatgcatgcatgcatgcaatgcatgggccagccagccacaatgtaccccggcggaaacgggaaaccggaaatgaatggcagcgagagcgcctgtgactctgtgggcgatcaccaatcggcggcccttgcgctagggtcctcaacgccagtcacatgcaacagcagcagacagcaactttcccaggccgcacatgatagtaccactctcttgtacccgcatctgcacctctaaatcctaagctctctctctctctctctctctctctctctctctctctcgcaacgagctacaggcgtgtacgtgttgtacgtatacttgtacgtaactaggtatagcaggacacaacaactgaagactttgctaacagtactgactcttcagattataagaaagctacctctcgatctgcaggggtatccaatcgaaacagtactactgactcttcaggtgataatcaaagaacctaagcattcatgggctcagtctccaagattaagtgatagaaatctgaggtttagctaggcaaagtcttctaattaattaagttggagcaatgcaagaccaggcaaatgaaactagcacacaagttgcaagaccaactgctggcgtagcaaattgattccaagcgtacagatcgacagtttgtagatctatgtgtcaattaactgacaaatccatctatgaatgcatggtacatgtatttacagtagactaggtgcttggcaccgatgcaactattttcttattaatttatgacaatggcgtgcaatgttcttgcccatgcttgaaaaaaaacagagagtagcaaatgcggtttgaccaaaatcaactgagatcctctaaaagacggtcataattaatcagagtcaacttttttgtgcttagtactcctatctactggtacatcttatatatatttccatttatgtgatgaagagcgttgtttgaactttaagcaaaccatatataggttgtttgaaaatgcaaaaggcaaatcattttgtagtatatactggggatcttgtccatttcgcttttggaaagagaaaagcagactctctctgcaactcatggacacggcacatgccatgaccggaaattctgtggcacaacattttctcccactcaatgcttgcgtcgaaactgataagtgtgttatgttagttcgcatcttgcgcctgggctgacagtctatccgatccccaaacactacaggatcattagatcatgcgggttgtacgtctcttagcaactatatcaagttgtgaagatatcagtccggatgcgcatatagggtatatagcactagcagtcatcgggagtaattgcatactttgtttcactttcagtagcgatcaactgtcacaagcatgataaaaactaaaaccaacatgaagaaaccgagaatcatacaacatgttttcttttgacaaagatgactagcggtgtccataaatttgttctcattctctgtttatggaacaacgacatcggtttcaatcagaacgtcaaagtggacggaaccgctcaaatcacgttagccacactacctgcgccatctagatagccgcaggaggatatatgcacctgttcacccccagcccagtccattatgtggaatctattatactccatcattttcacaatgtaagactttctagcattgcccatatacatatagatgttaacatcaaaatgaatgtgggcaacgctagaaaatcttatattgtaaaacagaggaagtatcaatcaaggagctagagtagcctagcgctatagcttgtattaataagcaaatccggagtcatcaattgagtaactatttggtgaactccttaaacttttcctggacatagacactaaagagaaaaaaaaagatggagggcagagagagatgaagagatgaggaggccccagcttgtctggaagaacgtacagctaccctaggttttgagatggcatccaagcttaacttgttttttttccctcttccaccaaaacacacgaccccatcacccccgtggtcctgccccctcatcttgccggccctaccatgtgcacttgcacctcctcctcttccctcacctcccccataaatacccagccacaccgcccgctgcacaccggccatctccaccacgaactctccaagctcttcttcctcctgagcactctagcttcactgcattgctttgcagcagcaacagaaacagagagagagaaatacactagctgattgatccagtggaatttggtagctgtgatggcgaagaagatcgcgccggcggccaacctgaagcagatcctgaggaggtgctcgagccttgggaggaggcagcagcagcagggcgcggtgccgaggggccacttcccggtgtacgtcggcgagagccggtgccggtacgtggtgcccatcgcctgcctggagcacccggacttcctgctgctgcttcggaaggccgaggaggagttcggcttcgagcacgacgccgccatcacgcttccctgccacgaggccgactttgaagccctcctcgccgccctgactgcctgagtgaccgttcaatcgatgaggcgatcgaccacttacccggccgtcgtcgttggtggctgccgcttccggcgcacggtgctgcagcagctgcccggtcgctcggccggggcaccagagatgcacgcacacgcagtggcagtacggctggcattggttggagcttggttgtgtagtgtagaccggaaatgcaaacatgggagttccggccggaaaccgatcaatcaccgggcgggtagactctgcttcagctgcccggtggccggtgggggttccgggcttcttgctcgtgggattctttcacgaattcttgccggttcatgcagcaaaatttgctgcttttagctagctatctagcttagtgtacgtacgcgcgtatgtatataatgcggagaccaattgattgatttgttcctcgaatggttttgatcaaatgaaggagaacaccattgctcacctcaggcgcgcactgcctgatgtgaccttcttgataaaacttgatgatgattggcatatctcgactagctacagcgcctacagctagtcaggggcgtataatgggaattaacttgacaagaaagatgtgctcttgataaaacagcagactgaaatgcagactgcacctaccgtgcacgagagaggtttgaatttaatctccattacagtgctatttggtaggtttcaatcatggacaccccttccagagttcattagtagggacacccatggaaaagtagaaatggcgtacgggcgatagattcacaatctcactggatgctgctggtatctgcttttcaagctagctcctcactaccgtcgcctttacattatactcttggatgactctgtggttggcgtagatatgggtgtcttgcaatttgtcccctaacagttcgagtcgtacgtgcgtgtgcgcgaccatgtacgtctccaccaggccaccaccaaatggccaataagtttggttcacggtcaaggttgaatgggatatggcgatccatattttgttggatatggcgatccagttttttgtttggttaggtgaatatcgataaaactgtttggttgtagtgatgaaggtggatttggtgatccaatttttttgtttagttgggcggagtaggtggatgagcagatgtggtcacctctcactgtagagagggtgagtatacccccatcaaattcatatatactacaaatcacaaattcatatatatatatatatatatatatatatatatatatatatatatatatatatatatatagagaaaaaaaagaaaaaaaacaaagaaataggaaaataaaaaggtcttcggcgctcacatcaggcgcctccgccgagctcgccgctcccgtcgccgccaatctcgcatccggcgccgccacgaagctcgcctcccgccgccgacgagctcgcatccggcgccgcggccgagcgcgcctcccgccgccgccgccgacgagctcgcatccggcgccgcggccgagcgcgcatctggcgccgccaccgccactcgcaccagccgccgccgccgctcgcaacagccgccgccgagctcccgctggtcgccgccctcgccgtcgctctttcttggagaggagtgatgcgactgccttggtcgctcgccccgcgctcgggcggctgcatccggccaattcggccggatcccctcatccggcatctggggggaatattcctccccgggccgctccatcccacccctgcccaggaaccaaacacccacaaaaaatgggccgccatgtcctatccacctatatccctccatccaaacacaccactaggcaaaggttatgcttgtcaatgaagctcgcaaacaaaattaatgctctatctgtttcttttttatttcaagtagcattatggtcttgtatattgcgcggctagaatcattatattttttctcacataatagcatatatatttttatttttgtattattaaaatatattaaaatgacaacataattttcaattctgttctgacctggccaaactattcgatacgtgatatttatagtgtattgtatatacgcgataattaataattattttttgatttctaattttaattattttttattatatttctgtatggactctaaattacttatctttcaacagttcttatttttataatttcaaattttctttatttataaattttgttcctatatggtctctaaacccttctttccatatttcttatttttaaatttcaaatttcagttatttaaaaattgtatttctatataaactctagacttctctttcaacactccttttaaaaaaaatttgaatttccgttatttgtattgctatatggactacactcttcttttaatatttctcttttttttatttctagtttcatttatttataaattatattcctatatggaatctagaattttttttaatattcgttatgttttaattctaaattttcgttatttctaaattgtatccctatatggactatagactcttcttacagtattccttttctaattcctttattgcaggagtattactataaggtttctagcatcttcttccaatatccttttttaaaaattttgattttagatatttctaaatagtatttctacgtggactctaagctctactctttgttttcttatttttttaattttgaatttcagttagttctaaatgaacaattgttacatggatcgactagcctaggctgtaggagatatgcgaaatatatactactcatagaacacatatccaataaatgaatacacatactatgagcataaataaataaataaataataagataattccattaattcaaggggcaaatgctatttgaccctaaggagcttttaactatttgccactcttacaaatgttgcttaacgatttgccactaggcccacatgtcatatacacatgagagcccacatgtaattgatagagtatggtaaatcgttaattgccatgtcacaagaatggcaaatagttaaattttgcccaactattaaattgaccctattttttttaaggggcaattgcatctgtgcccctactttgaaagccaattgctgttttgcccccacttttagggtttgcatttttacccccactttttaaatctgaagtagccttctacccccacttgtgacaactgtttggtgggtcccacattttgtgttaaagaaataaaaacaaaataaaaaaaggttttagaaattatgtaatgacatttgtacccctgagggaaagggaatggatagggttcttcccgtgcgtctccgtgagtcgggtcgaaatcctagctagctagcgcgggggcggcggcgcggcacggaggcggcggcggcggcggcggcggccgcgcgaggaggccgcggccacgcgggcgtgcgccggcgcccgctcgcaggaggtccacagccggcagccgctgctcttccacgtggaggcggcctctcacagccgagggcaagacaaggcagaaaagggaaagttgttggccgcatgcttgcgccgtgcatcatgtacgcgacggggagggtgtccgcccccaccggcggctgctgcgacggggtcaggaccctcaactccgccgccgccgaccaccagaccacctgcgcctgcatcaagcagcagacgagcggcatgggcggcctgaggcccgacctcgtcgccggcatcccctccaagtgcggcgtcaacatcccctacgccatcagcccttccaccgactgctccaggtaattcatttgccatcaataacggttttgatctgtgttattagctgcagcttttgttaatttgcctatgtgttgtgcattcgcatgcagggtgcactgagtggatcaaagtcgtcaagtgatgcgacaatgataaaggagagatcgatccatcgatctgcagctctcattttgcggttgctatctgcatttgtcgtcagagatggagctatagaaatgcatgatgctcctccgttctgttatttcctgcttacattctgcttcgttaattgcggtttgttgctctatgcaatgaagaactggacacagagcgatcaacaattaacaaaaaaatctagggtacatgggctgttgtatttttttttggaacaattcacaactctgttgtattatccatgtacaactaaatgtggcgttgatgtgtagtttagagggttcagagtgaatgcataggccgttcaaagcctcacattataacactcacacaagctgaaaaaaaatgagggcaaaatcacacaaagctaaaaaaaatggaggcaaaactacaataaccaccaagggtatatatgtctttttctctacaactgacaccgttagttgtggcggttagaaatgagggtacacagctgcttcagattcaaaaagtgggggtaaaaatacaaactctaaaatatggggtaaaacagcaattggttttaaaagtgggggcatggatacaattgcccctttttttttaactttgctcatttgaccccgctttttaaaatcaaagccaccatctgagcctctttttaatagtccgttagtgtcttagttagcaaaatgaaaaaaaataaaattgctagtatgaactgaccaatatacccctgattataaataataaccttatccaagttacaaatcaagagtcttcacccacacatctcggtggcacggctgggcgcatggaggaaggaggagcggcgggcggcggcgtcagcgagcgaagggagggacggcgatgggcgcgcgcgcttggagtagcagcagcgactgctgccaagcggagggagggagccagggaggggcggcggtccgcgcagggaggaggactgccagcgctggcgcgcagaggggaggcggcgcctgtgtgtggaggagcagcggcgtcggctgctgccgcgcggagggaggggcggcgtcggcacgcggaggcaggagaaccggcggcgcctgcaggcggaggagtggcggcacgggctgctgccgtgtggagggaggaggagcggcgccagcgagcgaaggcggtcggcgcgggcgcacggagtagcggcagcggttgctgccgtgcggagggagagagggacggcgattggcagtggcgccggcgccagcgcgctgaggggtggcggcgactgcgcgcgggctgacacaagtgctcgaatccgattgtgctctctctcttctgtcagttccggcgaactccaatgccattgacgtcggcggtggccggatggtcatccagccaacagagcacatgcccatggcacagcctctcatccccggcctgcagatcgacggcagcaacaggtcaacagcaacaggcagccactggcgccaccatcgtcatctcgacggccgagttctcctgcccggtgttggagagcgagcagctgaacactgtcctgagctccaatgacaatgagatgaactacaaatattaaaaaggactgaatgaaagaaaaaaaaatctttgatataacattggtaaatgagcaagggcaaaaatgataattgcttcacagttaacactgttatttggtcttcacggaatagggtcagctctgatgttcagttttaaaaaatggggtcaaatgagcaaacttgaaaaaatagggtcaatttagtagttgggcttcaaactagggtcaagtaagcaattgttccttaattcaaatatagtcttaccaaaatagtaaagaactaaacacacatcggaatctctaagaagactataggaccggagatactccaagcctatttctactaaaactgtagagaacacaatatagatagagagaattgctccttgaggtgtgtgttgggaagtgaaaagatctcctctatgatgaggatgctaggtctcgatctttcgataggtattgataactctcgatttggcggaaacttgacacacacaatccggcttccgatcaacacgatccgaaccatgcaaatcgcagcaccacgtctcctctggttatcaaccgtgcatcgtccggttgaccacgccgagaaggctaatccctgcatgcgaatcgaagaacacaagcaagaataagatagattgcaacacaattgcatacgaatgattaagcactcaaatttagggttccacaaaccgacctagcggcgaaactgcaatggcagaaataatctaagcaaaactcgactctaaacgatgacgactactaaatatatataattagggacgtcctagggttgcccaatggcgcacgcccctttggtctaagcgacgacataattacaaggtctaaaacccaaatcagatttggactggataaggtatgaggcttgttttgcagatttccgacaactcggtgggaattttaatgtatgaccaaaaccatctgaaagtatactccataagctttccaacaagtactcatgggccccgaaattccttttatacgagcggctaggtctgtttgaagttaatgctgtcagaaggcccgaatccgaatccaaaacgtgtagaactttatctcttatcttctttggaccaaacgtgacgtggttaggtaaaagtagactaggagaaggtcttggtttggtcccaatcaacttttttgatcatccatgcattccttacgcccggtctctgttccatcatccacgcaagtagatctgcaaacgagaagatacaaaactcatggtgtagtaacgtttattcaaatatatacggagtaataagtaaatctaatataaaacatatgtacctttggttgataaatacacaagttagtcatggacatatccaagctagttatgtccttatcactatttatagctttaaatggtggttgcttaaggcagttgtgggccgggaatcaagcataactgccatcaggagtgaatgaggagttgccaagtggaagggagtgttgggcgctccaaggctggttcagctgaaccagagtaaccgccattagccacctcctttggtgtgtggttgacaagtgggcctcttggtcggttcccggtggtttggccccactttgagtcagtttgagctgacttgtgggtgactcaatccgtgtgctcgcacgtgattagccagaagtgtgtttattctctgcattcatgttaattcttcaagcatagtagtactacactatttattattggaatacatgtaagaaatgctagttctctctttatttattatcatagttgactatcgcatttggtacttaatgactgtcaatagttttgcttatagtttttagaggtcccatcaacccccacaacactacttcttacaggtttgttgcttctctcctctttatgtcacttgtcatcgttgtgttctagatggactattttttttaaaaaaaatatatttttcatttcaatattttgttatttataaattgtattcatactttaactcctacaattatttttatatttttggatttttttttctgaattttaattaatctcgtgttgtgttctagatggtctcttctttcaatagtctttatttttttattcccacatgaaagactattgatataattaaactataagcggtatatttcaatcgtggatggtaccattacgagcggtatgttttaatcaattaaactataaatccaattagagataattaatctttagttgagttttttttttgaccaagggcattacgcccccatttccattactagaaatgaaagagattacaagatcaaagtcttacaaactgaagaacagaaaagaaaggacagaagccagcacaccggctgctttgaccatacatggactatccagaaggcacagaatcaacaactgcataacaagacttccaggactaacaggagccatgaacccagcatccacacaatcaacaaagcatactctacccccgccaaaagatcaacactgcagtctccccgtcggcctccatccaaacctagaattgtacacatcacttgcaatttgccttatgagcttggcccccaagagcagctttctttgatctgcctcccgcttctgcaaaagagcctaggattccatccagtggcaaaccaggaaaactacatcagtgggatcattaggcaattttttttatcaaaacaagctttatttctagttttctagacagcccagattacagcagcaataccagttacaatcaagtttttggttttgttcgagaaagcagaaagccaagccccaaaaaggtgttggcagtctttagctgttttgagatcaaaagcacattgtattatattccaaattagtctgacaagagagcaatcaaagaaaaggtgttgaattgattcctgtttgtcacaaaactgacattttgtatcaccctttctccaacctctcctaaacaaattgtccttagtcagattcttgcctctcaaaagaatccaaatgaaaattttaattttcaaaggaattttgaaactccaaattttcttaagaggaatgtctatttgttgaacagatagtgcattgtagaaggatttcacactgaagacccctgtttttgtcagattccagacaagcttatctctcaccccctcctcaacctgaatcccttccacagaaagtttaattttattccagtccctcaatttgcttccatacaaagaccttctaaactttataacctcccaacctttgtttttaatctcaaccaaggaaacatgttttgagagagtaatgttatagagagtagggaataagtgagccagaggtctgcccccgagccaactatcttcccaaaacataatggaccttccatcccccactttctttgtgcaaaaattatagaatctctcctttacttccatcaaaccttgccaaaagtgggaatcaccaggtttaggtttctgtatagacattgttttcttcttcaggtatttatccctcaacacctcctgccaccacccgtcctcattctcaagtttccaaatccattttcctaaaagagctttattcataagatccaaatctagaacacccaaaccctcctgatctctaggagtacaaatcacaggccactgtacaagatgatatttcctaatcccctgatcttcttgccagagcaatctccttctaaagaaatccatcctttccttcacaccagtgggaagtctatagaaagatatcatatataaaggaacataactcagactggaattaatgagaatcaatctccccccaattgactggagtctgccctgccagcagctcagtttactttccattgtattctcagcagttttccggtctttattgagaatccttttttgatcaataggaacccccaaatacctcataggcaaatcacctatgttacaagtgaaaagctggctgaacaacacttttctatctctggcctctcctatacaaaagacctcacttttatgaaaattgattttgaggtctgaaagctgttcaaacagacaaagaataaatttcaagttcctagcatattctaagttgtcagggagcaagaagatggtgtcatcagcatattgtaaaatagagatcttattttcttcattattacctagaccctccagaagagagtgctcctcagccctctgcaccagtaaagtaagtgcttcagctgccaaattgaacagcaatggggacaaagggtctccctgcctcagacctttgtgagtttggaaaagaggacctatctcatcattaactttaacagccaccttccctcccttaatgactttcataatccagtcacaccattgatcagggaaacctttagagactagcattctatgcacaaaaacccaattcactttgtcataagctttttccaaatcgactttgaagagaatgccactttgctttttatgatgaagagaattcaaaatttcatgcaaaatgacaaccccttctaaaatatatctgttcttaaggaaagcagattgattttttgagataatataacacatcacatgataaattctgttcatcagaacctttgttataattttgaagctaacattcaaaaggcaaattggcctaaatttttgaatttgggcagcatcttttgttttaggaacaagggtgatgatgccataattgagcctttccacatttaacaaacccttttggaaatcactaaggagttcaaacaaatcatttttaattaaatcccagaattttttgtagaattccccaggtatcccatcagggccaggggccttgtgttgtttcagttcaaagaccactcttttgatttcctccatagagaagggctcagtgagtctcctcttatcctcttcagtaacttggcagatcccttccatttcaatagaaatagagttttcaactgaatgaccaaacaactttttatagaaatgagtgatataacacagcaaattactttgcccctcaatttctccttcctcttgactaagagaatgaatttgacaatttcttcttctcccattagcttttgcatggtagtattttgtatttctatccccctctagaatttctctaaccttactcctttgaaaccacttccatttttcctcccttataacataggctagtttctgttctaactcctttctatcttccctatacttatgggtcataccaagtgcttcaatcttgatgtcaatggcatcaatttattttagaatgttttctttttccctcctatataaaccctcccaattcctgttccacccattgagtttttttcctaagcgccctgagttttttctgccatctctcaatactattgccagaatactgtttattccaaacatcaattatcacactccccaagtcttccctaaggaactaacctaactcaaatctgaacaaatgtttcttattaacaaatgcctcagttctcatcagaacagggctatgatcagagaaagtcgtcactaaaattctagcagtggttagaggaaaagcagcctcccaatcattgttgataaaaatcctatctaacttttctagagtggactgaatctggttgttaaaccatgtatactgtctattccccataccaacctctcttagattggattgctcaatgatggcattaaataagaaactccatttgttgtatcccctaggtttattcttttcactttcctttctcagaatattgaaatcctcacctacaaccaagggtctgttctgataatataaaacattggctagctcagccaaaaagttgttcttttgtgcgtattgagctgccccatatactaccacaagatcccaacacctcttatcatctattttttgtaacttcaatctcgcatgatagttcccaaagctagtatctaaaatatcatgcctatcagaatctatcccaacaagaatcccacctgatctcccattagcagggatccacctccaaaccaaattcctaccacctccaagactacccaacatagtagcagaaaattcctgcttaacagtttcaatgatgccaataaaatctaaatgatgatccttgattaggtcttgcaagtgacctattttttcaggactccccattcccctaatattccaaaaaagtccaatcatttttcttagaattatttttcccttttctcttacctaatatgggtgttaccttaacagtgtcaaggtttcccttcattcttttccctttcccactggaagtgtgtatgtttttaatcaaattttcgatctcatcaagttcagagtccacatcatcttctaaagagtataattctcccaagccagagagttcaggaaaatctcctgatttgctctcttgagttttgtctaaaattgcttcttgatttttcataaacaaattgactctagcattctccatatcctttattagatgaagattagaatcaacatcaaccaaggcacacccaagactaactcctaacaaattagcaatgttcatgagagagctatttggttcatcaataatagaagggattgaagcctgacctttgttaataaaggcattctgagcctctttcctttccattgccatgtcttgtggttttttgtcttctttatctctcagtctcttgcttctccttgtgtcttcttcttgactgtcgatgccctcttcagtcagaaccacaccaacttgcttggcaaagtttccttcagattcttgggaatctaggaaatcctcactgtctcccaagttaactctttctccttcttctcccctagggcccaattcagtctcagccatcacctccaaacagcttaaagttcctgtcccaccactagataaagccccatctccagcacgtgtctcttctacaatgggaatttcagacatctcagaccctttcccagcccctttgcttttagatagaatcacatttccttcttggaccaaaatcctagcagattgtttttccatctcctcatcttgcaacttcatggccaaatctctgtccctatggaactgaacacacttagccacatcagattcagttgtcaatccagggtccagtactagcacaacttcatcccccttcccagccctatacacacccttgttactacttggtccctgttctcccccctcattgacatgttgtttttcctccctctatcccaccttggttggagtatagacagcttccttatcctcttcaaagacttgctctctaaaccacccttgctctaccacttcctccaaagtgtactgagcctggaatagcagcccttttggtgtagtcagaattagttttagaggaagggcttccaaatccatcatacccaccttgattctgatgagaccttttgccctgaaagtaatcatgtctacttccatcactagtcccaagttagaaccaacctcaaaaggggcagggtaagtcttcatttcatccggaatacctgtcactcttgcccaaactgtatgcatcttccctacagcttcaggttcttgggtccattctttgacattaacctgcacattagtccccttgacagtaaagtgatcaaagtttgacagctcatcaaacctcatcctattgggaaacctcatttgaaaggtcccattaggaatttcttttgctttccatatccaattccacttgaactgctgagtaaaaccttgttccaattgcgccacagttaatccccctccactaatgattgaaatcattgccaaaggattaatgtgttcctttgctggctcagatctagtgttctgaatcaatatacatccaagccctggagcaccatatctcaccaacttggcaataggtctgggttgcttatcatatagacaatccttagtcttgtgagtaggcttagcacaattgacacaaaacacagcaacatgacaatccttaaccaagtgaccaacacctttgcatctcacacaaaagattctgtgagagttcggattcataccatgtcttgggtttgcttggggaggaggacgagaagctgcaacctcagctttcgcctcatcctgcttgaggtttgagacagtaattcccacttcggtcttctcctgcatctgcatcggcttgatctgctgcactaaactcccctctttggttgccacagccgagacttgctcatccctcttttcttcagcgcgccctggtagtggatgaactgctcgaactccctcctggccttgcctcccatgatgctccactcctagcggtcgcctcccatggaacgctggccttggttggaagcgccctctccaaccccctccttgttgcgccattgctggaatccgacctcgaacaaccttctcaaatctgcgcgtatctcccttgatcgtacctgtccacctcgattccccgccaccaattcctagcctcggccactcctccgccgccgccttcacctccctcaactcctcttttctccacccccctctaaaccctagctctcgaggattcgatccccacagatgcttcaggtgccgatccagatgtgccagctgacgtgaaagtctagggccaaaaccccggctatagggatgggctagatggcccaatctccctccgccatggatgagctccttgggcccttccccagaaacttccgaaaagcagcgcgaaacccctcccgcgaggaattttgtcgcgatatgccctttcaaacttccggatcccgccccttgaaccttacctccgtctctgagcgccgccgaggtcgccggagagaccctcgccgccgatgaactctcctgcgagaggagtcgccgcccaatcgccctctccgccatcgctccttctccgacccctaaacattggattagtccaatctctttagttgagttttacatgaactcttctttttatttatttttattttttatttcgaatttcaattacttctaaatgtattcctagtcgaagtcttcttttctcactagtttttagcctccgtaatgaacatggtgcttcctttcaaggcgttaatccaaattttgctcctacactaataatagaaaaccatgattaaatttgaaaataacccagacatgcaaagacttgtcacgtgaggtcagtctgaccatagccatctggccagtcagatagacggtagggggccggtcaaaccaacggagtccgattctaagtctgatttgtcggtcctcggattttcttgctaaagcctaagattttagagtcttaattggtttctacacctaattggacgtggaaaaaaccatgggaaggaatcccgcccctcctattaatataagtgggctaagatcgattgaataaacaaccaatcaattgtccaaatctatttagtatccaaaccctctatattctatatcaccctccttcttactaccaatcccaaatgtattctcctccaatctcaaaattgcttgttgtctctcgtctctacagagttagaggacgttctaactggcctgccgagtcgaaaataaaccggtgtaacgtccaccctgacggggcctctcccgggtgttcgttcggcgacatctacgcactccgtacagtggtctgtcttagggtgccaccacgagttgcacacaacgtgtttaaggtgtagagctgtgactcgttgtcaacacaagctgttttaataatataatagattccgccattcttccatctatttttcatggttttattctagtcattcgtgcgtatagattctagcgaggagaacagtattctagcgttcgaaaaggtctgtgttttcctcaataatcactactacagaaaataacatcagtgtcagttcgtaactagcagactatcatcagtgccggaaatcaaatttataatatggtcatgtttgataagttgaagagcaaagatggtgctcattatcatcggtacactcaataatcgagcggtgtagaatattcgtgtctgaacgtggtataattcattggtggagaaaccatctttggtcggtcgatcaaattccataataatcccggttacaataaaaccgggactaaagattatcttaagtcccggttgaaaaaggttataggtactttttgatctttagtctcggttggtaatcaatctttagtcccggttagtaacaccaaccgggaaaaaagatcggcatgcgcggagagatcgaggcatgcgggatcgagatacatatctcctcctcccctcctcctcttctcatctcctccgatccccttctcctcgctatcttacacgcggaggatcccctcctcctctccctcctctcattctcctccccctcccccctcctccccgatctgcaggcggcgccgccgccgcacgaggctccttctcctccccctcccccctcctccccggtctgcaggcgcggcgccggcctcgcgcggcgctggccggcggaaggcggaaggcagcggctgggcggcagacggaagatggcggcttgttttgttgttttttttttttgagaatttgtgatccggatctgagatgtatttgatttgtgtgtgatgtgaatatgtgatgaattttgtagaagttgtgatgtaattttttttaagattttgtgatgtatttggagatgatcgatttgaggatttggaggtgataattgatttgggattttggagatggggatggagtgaaatcaatatattaaaaacaatgaagaaaagaatagaataaaggagcagtcgggatcagcctggctctatctttagtcccggaactaaaggcaatatctttagtcctaaagatagatttttactcccggttatttcacccgggacaatggatacacaagcaataattaaacctatctctaattagttcaactcgaagtaattctctacaaacacttgtgaattggtttatttgtgaatttttatggtcgtcatggtcggacaagagtccttgtctagtagaaatattaatttgtgatttttgcattacttataggctatcgccgccgcggggcttccctgcccagctgctaccgcatgccgccctgctacttccacctgccgccgctcggctgcccttgccgctgcgagctgccgcagctgtgcgcctatggcacggtcccccagcagcggatttgactgggcgcctatcgaccggatctgactaagtgaggaaatgcgaatttacaaaattaccctccacgcaaatagatgaaaagacaaatataccctatttaatttatattgcagaataatttagagaaaaatcagattaatttacaccgttagataaaatgtactggtagtatatatttgcagtacaatgtaccgtaaaatttgtctaaattaaaactattagataatgcgggacctttattgaacagcaatcgaacttaaattaaataaatacgtactactagagtggaccacaagctagtagaaagtaagacgtacgtcgctggtagtgtataattgatacaatcatattttatatgcaattaaagtgattattatagatcgtattttttaggagatgataaaaaagaaatatagattagcaagatggaatattattgctcaatcaaagaaccaggatagactaggggtgcataaaatagaaatcataataaatatatgttaagcaaattgtttttaaactgattaattagaaagatatttggccggacatattaaagaaaaatatttataaaacaatacagtcacccaagttaagagaaaacaagaggattctcatttttggtcaagcctcataaaggtcaagaattttattaaaaaaattaggatcatgggtagtaaatgatgggaagcaagtaagatattggaaggataatggttaggaaatatttcctctactttatggatagatatccaattctctacaatattgctcaaagagaaatgtttcagttgtaacggtcatgacttctattccactaaatggtttctttaaaagtgcattattggtaggccagaacctggaaaattggcatgatttagtgaccaatattaattgtgcatattcaattgaatgatgatattgactatttagatggaatcttcatcaaatttgttaattttgggtttgttctatgcacttggctttaataaataatgaccatattaagagaaacatatttttatagaaattaaaatgcttcttaaaataaacatttttgtgtattaccatttaaagaagtaatattaactaaagataatttaccatgaaggaattggaatagcaatataactttttttttattaaaagtgaaactatttatcagtttttagtaccattttgctaaatttctttggagatcaatacatatttcttgtggcttggaacctctaaaaattacttcctctatcccgtagtaggttcattttaagcttcttctatttgtcccaaaataagtttgtttttagaataatcattgcattggagtttgtgaaagtagagaataattgtattgggatttgataaagtgagaaatagttgcattgggatttaataaagttgggttattctgttttttttttgttttttattggtatgtgtaaaaataaacttattttgggatggagttagtacttctcatattgatggaaattggcttaaaggtattgactcaaaaacaaagaagcttattctagtaggggcatctgctatatgttgggttttttgttttgtaaaaatgatatgatttttaacaaatcattaatgaaatcttatctgcaggtcctgttaagggcaacgtaccgatttcggttctgggcacaacttcaaagatgtgacgaggacaagaaactaatatatattgcgtgctgaaacctagaaacaatggtcatgtatatatttgctaactttgggtgtatatttccaaatggacttgaataaacgatgttcgagttattagttattgtttcatcatttcctagtttttatgtgctctttattgagtgaactatgtaataagtggttgtaggttctttttttttttagggaatggttgtagcttctctgaagcaaaggccgggagtctttccattatctaaaagatgcaattaaatcgatcaatttacgatattttatctgtcattaattattaggcagcaatgcttagtagcaaaaaattaatttatgtccctttagaaaaaaaaaactttttttattcagtcgaattatttcatgggatcatttaacccttatactatttatttgctcattttactctaaactgttgaaaatggtttactttatccataataatatttttcttttcaaaactttctatgtaagctatatatttttatgctgtagttttgtagagcaattgatttttagatcagtcttttggagcttccaaaccatgcgaacaatgatgataaaaaaaattataaatagtgtcgagacttataggagaatattacttactactacctccgtttcaggttataagactttcaaccattgcccacattcatatatatgttaaagaatctatatatatatatatatatatatatatacatatatatatatatatatatatatgtgcgcgcgcgcctagatttattaacatgtatataaatatgtgcaatgctacaaagtcttataacctgaaacagaagaagtaatatataggaagggaaaaagagaaatgcagttagggattaagtaggaccatctccaatagtttgaggtgtaaaagaagaacaaaaattgtttagaggtcgagtgctctggtgaaatagcttaagggaaaaaatgaatttcttttcaaacttttatatatttaaattaaacaatgttaaaaacatgaaaaaaaatcaaatttataatatggtcacgtttgataagttgaagagcaaagatggtgctcattatcatcggtacactcaataatcgagcggtgtagaatattcgtgtctgaacatggtataattcattggcggagaaaccatctttggtcggtcgaccagattccataataatcccggttacaataaaaccgggactaaagattatcttaagtctcggttgaaaaaggttataggtactttttgatctttagtctcggttggtaatcaatctttagtcctggttagtaacatcaaccggaaaaaaagatcggcatgcgcacagagatcgaggcgtgcgggatcaagatacatatctcctcctccccttctcctcttctcctctcctccgatccccttctcctcgctatcttacacgcggaggattctctcctcctcctcctcctctccttctcctccccctcccccctcctccccgatctgcaggcggcggcggtgccgcgcgaggctccttctcctccccctcccccctcctccccggtctgcaggcgcggcgccggcctcgcgcggcggccgggcggctggcggccgcaggcggaaggcggaaggcggcggctgggcggcaggcggaagatggcggcttgttttgtttttttttttttgagaatttgtgatccggatctgagatgtatttgatttgtgtgtgatgtggatatgtgatgaatttattagaagttgtgatgtaattttttttaagattttgtgatgtatttggagatgatcgatttgaggatttggaggtgataattgatttgggattttggagatggggatggagtgaaatcaatatattaaaaacaatgaagaaaagaatagaataaaggagcagccgggatcagcctggctctatctttagtaccggaactaaaggcaatatctttagtcctaaagatagatttttagtcccggttatttcacccaggactaacgatagcgatctttagttccggatttgtagtctcgattggaaaactgggactaaaggggggttacgaaccgggagtaaaaacttcttctccaccagtgattgtattgttaagggaggatggatactatagtatctatatgcacgcggcttctaaatggaatagggcctgtttgggggagcttaacattatgaaaagcagctgctgagaagctagctggtgagaatctagagaagctagaaaacccagcttttggtttctagttcattttctagattctacgactacagattgattctcagaatctgggtaaaaagctgaactgttggagggagcttctggctactggagattctaggagaagctgcagctgctagaagctcccccaaacagatccatagaatgaattaattattataaagttgaaattatattttaaacagatttttaataaattcatatgtatataaagtttttattaaaattatatcgtttagtagtttgagaagcgtgcctatctatgtattctttcatatgtactttctataaagttatatcccactaagtctaaagctcaacatgcaaccatatcacattatcacccactagtaataattacatattcttatcaagcatacaacatcatctacaatttatttaattttataaatcaacatgtaagtatatctaatcatcacccctcacatcatttgcacaatattttaacaaatctatcatttttacaatatttaagatatacttatcaatatgtttcacattaatacggggtatcatttgtttgtttcatgataagcattgataaaccctgatgttttattattttttttctcttgaaaaacaaattgagcattgtttactaattcccgcatcacctagtttctttaaaagggacagcccaaaagtgattaatttactgtatttgaaatatggcataaagaaatgttttttgggagcattggctgcaacttgcgaggagtacaaacagtcgtacagtgttacgtacaatcctcacctaccatttccggtccctactgatcaccagccagcaacccccgaaaagcagtacattcccagatgcaatttgggagtagattcattgaacatcgcagattggcagtgtagagaacatggtgtttcggaaatcctgcaatcagtatagacagctagtactagctagccttctgtggcctgataaacccgcccaaaaaaggaccgtcctgcccgaatcaaaatcaatcattcaatcaattgaccgcgcaagacagaaaatctcccttgttatccctctctccagagaagcagcaaccgggttagtacagtacgcagcaacggcttctggcgtagcaggtgccgggacaacgtccacatgcgccacataccgccctgcgcacccgtgccggtaggcccggtacacggtccctaccccgccacgctcccagaggccgcgaaaccggagtagagaaatcagccatatccgcggcgcgcgatcggcgccaggcagtagcgtggtaggaccgtacattccacctcgcgcgcgacccactagctaccagccttctactactaacacccacccggccgtgccgctgccgccgtgtgcccgagcgagcccacgcccacatgcacccgcgtgtctcccacccttcccccttaaataccacgctattccgcaggtggcaggtcgatgtctcgctgctcgacgtaccactactactgctgcacgcactaaccgtccggacgtccggtggacatcgaccggcgccatatggcgatcacggggtccaagaagccggggcagctcaagcagatgctgcggaggtgctcgtccagcctcgggataaagggcgccggcggcgacgacgatgggctgcctggggacgtgccgaggggccacttcgccgtgtacgtcggcatcagccggagacgctacatcgtgccggtggcgtgccttgcggcgccagagttccaggagcttctcaggaaggccgaggaggagtttggcttcgaccacgacatgggtatcaccctgccctgcgatgaggccaccttccacggcgtcctcgcctccgcctctgccacctccatcagatgagatgaggcaggcgcgcttgcattgcgatttgttgcattgcttgctagggtagaaattgaggcatgatcgtgcatggatgttggcacattcttatttttttcctctcctctctagctagcttcaattcctattgtaagttcggctgtgctgtgatcgatcgagttgtgaaaattctcagagcgtgctgccatttggctgccctgtgagaacgatattccaacttccatagatcgatcgctcaagtaaaaatattgtgttccagcccaacgaaaaataacatcattttcatcagatgatcattgtttttgtttggtgtactggggcgcactgatcaatcacatggtggacacctgttcttgctctcttatgtgtactggactgactgcgtgtcgcactcgtaccagagtgacatctgcaaacaggcatctctccagattaggttctgtttctgtgtttagtttgtgtgttaaatttttttaagtatacggacacatatttaaagtattaaatataaaataataacaaaacaaattatagattccacctgtaaactacatgtgagacgaatctattaagcctaattaatccgtcattagcaaatgtttactatagcaccacattattaaaacatgacataattaggctcaaaagattcgtctcgcgatttacatgcaaactgtgtaattggttttttcgtccacatttaaagctctatgcatgtgtctaaacatttgacgtgataaaaaagttgaaagtttgaagaaaaaagtttaaatctaaacacagcctgaagcgaaaagtaaaagtgaagatgatcagtaacagtcgaaggatctctcgactccaagagaacttttgacttctagctgcttccctgaagtttttgtcggtatagcttgtggctgtgcaagcgagtgccggtgggcacagaaagtccaccctactatcacactagagctaggggcgcgccaatgacagtacgaggaaatgccgcctggacgcaaccagggtcaagaaagtacgaggaagtgtcttacatagaagcaaaccacagtacaaattgcacacaggcatcttgatatttagaggtctctaatagcagtaagtacatatatagatggttcttcatattaggaggttccatgattaccatgtaaggcctagaactaatacatgttatcttgacagtgatcaacctggttgatggcagcaaaaggatggctgcaacatagccatgagtattgctatgttctttatagaacatcgaaggtggcttccaggcgagttgttttgtagaaatggaaggtgcatagtgattgtaggtatatgtgattgtgggttgcaaattttgcccatcctttcttcaggttgcatcgaccatccgttgacatatggaggatcatattctttgaaacaccacctgcaatttgaactccaatgctgatggtttccttgccttccattaatggctttaagtagtcttgagaaaattctttagtacagtactgtaattggcattgtatatcagccttgactcataattggtaagatagatagccatgtatggtgtatataaataaatgagtagcagatgtaggaacttacaactctatcctgcttcatgaatgtgttattcacagcaacagcatagaatttgcttgaacggtctaggcactcaagatcttcgatatactttttcaagtcagctgttggatcaacattctttgcacagaaacacagctcgttaaacgcacgcttagtgctgcctgtatgaaaatactcctattagtatttgcattgtttgcgaaagaactgaatgaacatttaaaagttgctgatgaagagagtttttgcaggctgcaactggtacattagcatctaaaaaacttaggacggagttttaagagatctagctgaggagtattcaagctgctagatagggtgtaatgactgtaagtgaagtgaaaattgcataagtataaaatagatgttaggtgtcagctggcggagttttttttaagaaggtcagtgtgagtaaaatgtactgacaacattatacgaagcttggcatgattgttttccatgtagttttatcatgcgagattatttgatcttcattatactgtgtgaacaaatttaattaatttacataaaacaaggattagatttacctgtcatggtggtgttggaaggggtatcagatgatagatcagttttagtgttggaagaagtgtctgatgtatctgcatgtggtggatggttggaataaacagtcatttatatatgtgtatctctagatgaagaaacaagcacataagatgggctagatatacaaaaataatagttgtatgagaaatgataaaggataaccttcagtggaagtggcagaaatagtaattgctctggtgtgaggctgatagctgatattgataccttggatgattgatgcacatgtctgtttgatttgatttgaaactatacaggaaacaaaggaaaggatgtctcggttaattctaaaaatgtctggcgcaacaataaaagccagaggcactgcacaataaaaaacatcgggcaccataaaataaaatccaaaagcagatgggacgacatagacaatttctactttctttctttttaccttgaacaacactctgcatgcggaataaaaaggcacagccaatcaacatatatatatagattaacaaaatctgtctataatcatccacaaaggaaatgcataacaagtgaaccatagacactgataaccttcctctaccaacaattgaggccttatctatataaaaccttaaccggcagtggaaccaacccatccaattaaacacgcatataaacatccactccttacacatcaacgcagatattaaaattttatctcctgtttgcttccatgcaattagtagatggcaagctgcagcaaaggtaaatataatagaaaattacacaggggaccacaagccaacggaatgcaccatgccagcagaaatgaaatagaaaatcacatagggtaccacaaggcaatggaatgcaccatgctagcagaaacacagggacataaaccaacatgcaaacaccagtaagaacgagcaaaagcggcatcgaatgctgcatgagcacctggaaacaaaatagatgaaactggaacactctatgtttctgcaggcactctaccaatagcatatataactgaacatctaccagaaataaaggaatcctatcacaccgacctttaaataacaaaatgtagtgaccagcacctaaggaacatgttgacactctacgttcaagctaacaattttttttatcacggatcattttttcccatagcgataaatacacagagaactataaaagagaacatgggcagtgcctttttaagaacaactctatctttttttgataaaggaaagaacgcataagcctctgcacctataatatcaagaaggattctccatcacgccgcaacctcattgcagccatagaagtaaaaggatgtctgaaccaattctaaaactgtttggcacgaaaataaaagccaaaggtattgcacaacaaaaaaacactgagcatgataaaataggatccaaatatagataggacgacacagagaatctccatgctctttctttcaccttgaacaatcctctgcatgcggagtaaataggaacagccaaccaacacatatataaactaacaaaacatgtctataattatctagaaaggaaatctatagcgagcgaggcaagagcattgacaatctccctctaccaaaaattgaggctctatgtatacggaatattaattgacagagaaatcaaacccatccaattaagcagaaacataaatattcccccatcacccatcaatccagatattcaggtttcatttcttatgtgctttcttacaaccagtaaacaacaagccgtggtaaacctaaatatagtagaaaactacacagaacaccacaatccaacgaagtgcaccatggcaatacaaacaaaatagaaaggaaaccggattgccccatgcctgtgcgaacatctgcctatcccctcgaataaaagaaaatatttagagcagaacaatgtatgaaccggtaggaatggaaagtaaacctgatcatttcaataagcagttaagtacacaccatgcctatcaatgactgcccacaagagctattaagactatcactgaagaaagaatcggaggtagaactgggggtgtcggcactgatccccaccttcccatacatgatgctgaacatagctggaatcagacgtgcccggtcgctgttgctgctgttgcttgcatcccacaaatcctggaagggaaacagaagcagatcaacataatggctcataacatcacagaaattcctcgacaaaaccatcatctttgccctgtcctgcaggaacccaccctgaaaaggccgtccagctccctcggcaacgcgaccatgtgtactgttctagcaccgccagcccagagataccagtgactcctccatggccgagctcaaacaaggagggaatgcacagcattcatcagcacaaacggtggaagaacaggaagaaactgccgtttacctctggcacacagacagggaaggatatgcgagcgtcggcagcagcaaggttggcgaacggtggctcccatccaaggaagaagcaatcgtcgccgcggccactacagcgatcgctaccggcatcccagctaggtagcaccacactacaaaacaaagagatcagtatgcttgtcacattttgacaaataacagaatgatcagggaacttcctgctagctaaccaaccaaccttcacttatctgacattctgaactgataatcgtggagcacaacaaatcaaatcaaggcaagccgcactgccactgccacattctggaatcgctggatgaacaggtgaatgtatagaattaggtggcaattagggctagtcagaaagttaaaaaagaaagccagtcactcaccatccatccagacacgatacttcatggagtcacaggctgctgttggtgtgaggaccacccgcagccatggtcagcaatgcacacgccctcgaaaccctcatagagtccaacccaaccctgcataattgaaggcagcacaacaacccaccaatgtccatcttggtgaagaagatgaagttgatggcgtccgcctgtgccagcaaccgcatcaacgtgtagtcgttgttccgcctaaacaaaaatcaccagaaatctctgtagagaggaagaagctaactcacatgtcgttggcaaggttgaccctggtgttggcgaagaagccgcagcctgggctgtcatcgagggtagcggatttgaaaatgaactcgtaccacaccaagcttctccacctccaaatcacattgtgattgagggcggcggccggtggcgtggatctgctgcaggagagggcagcgatggttgtggccagtggacgtcttgcggcatggacctgctgcgtgggagggcagcggcggtggggtggcggcgcgacggccgacgatggcgaggggagggatgacgtcgacggagtcgggcggcgcgaggggtcggctgctaggggaattgatgacccacgatggtgaggggagggacgaagtcggcgtatgctgcagccaccacaggtgctcgaacagcaaagcgtccacggcgaccgccaccgcgccgccgcgggtcagctgcccggccgccgcgaggaggcgccacaccagcccggcctcgagcacggccgggtcgacaggggaacaagctcctctcccccttcgtcgtccccacctccaccctgaccacatgcgccgccgcggaagcggaggcggaggagtcgaggcgccggtgcctgccgcggcgagacgaggatcggaggaaggtgtagcaaccggcggaggacggacgcggcgacggggcctcctcctcctcctcgccgccaccatcggcgggcgcagcggcgtggctcccgatgccaggatctgggccgttagctctttgcgccgcctgtggcgtggtcgtcggaggtccgacctcgtcgctgatgaaggctgtgcccgccttcaccgttgctcggcagagatagctgcgcttggcgacagcgcgaggcggcggtggaggagctccgaaacggcgacgcgacggcggtggcagagtgggtggaggcggtggcggtggcgcgatggcgatggggacgacgatggctacggcgcgagggggaggcgacggtgctcggcggcggcagagggagagggagagggtgagacgagagggaggaggggagaagggcggcggcggctaggtagaggtggccaaacgggccgggccaaacgggcggcccggggcacggccgaacctgtagcaggcacggcccggcacggcctgctacagtaacgggccgtgccggcacggcacgagtagccgtgccgtgcttgggccgctggccgagcccgcgggccggcacggcacggcacggctactgtagcggcacggcacggcacggcccgcggcacggcacggcccgtttcaccggcggcccgtcaggccgaaagcgggccagcggcacacgcgccaggccgaaagcagggacagggcgggcggcggtcgaatgggaaggcgccacgtggcactaacggctatttgaccgttcaaatttgaaaataaccgttgggaggctaaaaaattcataaaaatttcgaaaaaattccaaaaaatctcaaatttcgccctataaatagggcatgaaccccagccatttctcctcatcccacactcctcatcttgtgctctcaagtgttttaagtgctctctttgttctcaagtgtgcattttttttttattttgacaaaatttgaaatcaaaattagtttcgtagttcaacagtttgatcgcagaggtttgaagagctcgcggttggaaagatgtaagtaatattcaaatttgtgtattatttgtattgtgtttgtgaattcaataaatattcgaaaatttgtttatgtcggtttaaattttcagaatggatccgaactttccataccagtcgccgtcgttcaccttgggtgatttcgaccccaactacatgtcgaggtttgacgatacctccggatcggctccaactccaccatctgtggaggaggtaccggatcatacggctgtcgtaaattatatgaggtttttggaagatatgaagtaaagtttcaggaagttcgccagcagagaccccctcctatccccactacaggtaagaagaagatacagtggggtaggatttggggtggatcgtcttcaatccaaggtggtggcagttcgtcggctacaagtggagacgcctcttcgcaagttgtggccgaagagttgtccggttatttggacagcgacgccatccaccacgaagcacaagatttcaacgtcctcgggtggtggaatgaccacaagataacatatcctgtgctttcaaaactagcacgggatgtgttgacggtgcccgtgtcgacggtgtcctccgaatcggccttcagtctatgcggccgaatcatcgaagaccggaggacgactctgcgcagcgaccacgtcgaaatgctactaagcgttaaagactgggagcttgctcgacaacatgcccaatacactgcagacaaccaagaattggccgcccagttcgagcaactctacctggatccagaccaaccccagtaaaattttgttagaagtagttctgacctttgagctgtactcttttctttgtcatggttttctcattttcccctatgagtttttacatgacaaagtttttaacgaggcagcatgtatcattgtatcctgtaatgatataaacatcaataaaggtcattactatttttaacaaattcttttgcaatattttcgcaagtgtggatttatctttaaattatttcaaaataatgaatcacaatctatatttttaaatttttcaacacaacaaaaaaataccattttttcttttttttaacattagcaaatcattactttttttaaaaacttttatttccattttttaaataccattttttcattttttaacattagtaaatcattacttttttttaaacattttatttccatttttaattttttttccttatacatttcctttgcttttttttttaaaaaacactgtgcactggcggcctggcggctggcggcctggcggcctggcggccagtgcagctcagctgccggcctgccttcacgggccgccgtgccccgaacggcccgtgggccgcaggcgtgccgtgccggcacgggcacggcccggccatccacgggccgtgcttgggccggcggctcggcacgtgggccggcacggcacggcccgtttcatcagccgtgcctaacgggccgtgccgaaacgggccgtgccggacccgtgcccgtgccgggccggggcgtgccgcccgtttggacacctatacggctagggcatggggtgggtgggttagtgtgagccatttttcgaaaaagcccctcatgttttaagttttacaacgcggttttaattcacgatttttcttttctatgcacggaatatccgaattctataaggaccttaatgcaataaacacctcagaggcactattcttgagggacctcgattgaattatctggaaatcgaagggttttttcacaaaaataccacctcgcgcactgtacatactgtagcaaaatcctgacgtggcacccgtcctcgcttgcccaactcgcgcccctttatatattccgattccgattccaatggcacacactgctcctatgtttattgtactttttgattttgaacacagtagtttcggaaggagtatttgggcaactcgctctgtagcggtagcaatctgaacattcagggtgtgtttagatccatgccaaaattagaaatttgactaaaattagaagtttgaagaaaaaagttaaaagtttatgtgtgtagggaagttttgatgtgatggaaaagttggaagtttgaagaataagttaggagctaacactaccacaggacacgagattagtgccagttgagaaacccctttctgtgtcggttttcccaaccggcactatgaaggcagcattaaaccggcaccaatcttattttaaaaaccagaaccttcgataccactcgcgagcaaaaaaaaataaaggctcgatgcatcggctcgatttgagccgatgcatcgagctcatccaccctgcatcacaatccctaatccccaatccccaatccccaatcacacaacacattcacataaatcacagaaatcatttcactaatccccaatccccaaccatagaagtcattcacacaaatcatttcactaacatcaagaaacattgaagaacatcatacaaatcatttcacacaaatcttttaagaaacatttcgccagatctcatggagggagggcgccaccgtatccccccgcccttccgccgccgctaggctgcccctctgcgaacgctgttgggccgcccctccccggatctggcggaggggagggcgcggccgctgctaccgcctccgcaagccgcggacagcgagggaatcgagaggggagggtgccgtcgccaggccgccactgcctctcatcccgccgccgcatcctccctcccctccgctgccgctgggccgcccctccccggatcttgcggaggggagcgcgcggcccccgccgccgcctccgctggccgggagaggagaaagagaagagaagagagcggagagaacgagaggagatgagtggagacaggcaccgagaggagagaagagagtggagagacagagagagacgagcgctgcggagcggccttatctcctcgaagcttcgtggtggggcccgctggctcggctcatcccagctcgactcaattcataggtgccggtattttacataaaccggcacctataatttattataggtgccggtttttaatactaaaggttccctttttaaaaaaaactaacacaaaatagaataggtgccgactttatttagaaccggcacctataattacttaaaggtgtcggttttttacgattttaacccgcagaggtgggaaaaggtctataggtgccagttttagcactaccggcacctatagtggtgacacctatttgatgttttgtagtagtgtaaaccaggcctcactcttctgctcctgcagcaacaacttatttctgctaccctgcaaattagttcaaacttcaaatagcaccagggttatgaaatattaaatttgaataattattaagtagactagaaaaaaatacccgtgcgttacaacgggtgaagtttattttaattttattattgttatatggtttagttaagataatattcactgtgggagttcgcttgatatatatatatatatataaccgactcatacacggatgacgcaccaaaatatcggcaagaatatttttaatttttataatagtagagatttattttcctttatataatagaataatagacatctcaggatgagtgggcctaaaaatagaagatgcagccctacacacacgtgggcctttccaggtgcacagttgcacggtgctctcccactgatacggagctaagctatgcgttacggacttaagaaaaaaaggaaatgcatgcgaatgctgaaaagaaaaacgacgaacgggagcgattgagattctaagacgatggtccaaataatctgacaaaaacattttcaatttttataatagtagagatagagatagagatatgtttttcactaatacccttgttagtgtctgttcgactaaatcttacaccaatagtggttcccgttcatcagaaccccacgcaaccaaccagtgtcagcttaaaaaaacggtattgatgagacaaaaataccaataccaattcattagaataactggctctgatgttatcaatgtcggttctttttagaaaggcattgatgtgtgctagctccaaaccatctatagccaatgtaataaccaatttatacaatagttgcttaatatactgttaatatctggtcccacctatcatacacacattacatcttggagtccgtgttgtagctggctacagatttgttgcccgctgctcttctctctctatctttatctctttaaaatatatttatagctggcttatagcctgctattgtatctgctctactgggttttcataaaagcaggactgatccaagtcgagttctctctcttgccttttattcctcacccttctctcactttttttgggaagctctcactatcggtcttaaattctcaattctcgcctcctcccttctctctccccgatctctctctctcacactctcataggcaaggcagcgaccgccctcgctggcactggtggcaagactcagtagccatgcagttagtgatggagcaaagaacctacaggtaatagtcaagttaacccgtgcatcactgatagtttcaatgcttacaccacaatttcattccctgtaattaccgttggaattaaatggatgggctaaggcccactcgaagattaattctttgtaaaatcacaaaagctcacttcatgggatggcatgcatgtggagtttagtaccaccttacttatttaaagagagggggacctccttaaaagagaggatgccctcctagtcacttgaagcatgtgtgatggagaaaagagaggggaacacacgcgcgcgctcgctcgcctcgcctggcaggcgttgcgcgtgcatgacgtacgcctccttttgcagtgttttgtcatggtgtgggaaaacggcatggagtccggataagttacgcgcgacctatccggttcagttacgcggagtggagatcgtgtaggcgccctgatcaagcgacctatctctatataaaccgagccgccgccttcacgcaacacacgcgaaatcaatctagggttttccctgatcaagcgacctttctctatataaaccgagccgccgtcttcacgcaacacacgcgaaatcaatttagggtttgcctcctactctgtgctgcgccgtcgctcgtagactactccatcccgctcgccggcgtgcaccggcaatcgggagagcaggtctccggaacctctgccttcggcgtcctgcaccgggagaaggcggtaataaggtttttgggaagcgcttcgcgcgactgcttcctgttcgtccacgacggctgccttcctctctgctcgtgtgctgcgcgccttcgtcgatgcccgcaaccgcgagtagttcctgccgagcaaccggtctttccgccacctcgatacgtgttcgacatgttgcacatatttgatctgttcatgttttactgcttaatttacatgtgtagatctaatgatgcgttcatgctagtttacatctgcaatgtcatgatttttttatggaataaactaaatcattatgtgcttataatttcaataaaaccttattataggcgttgtgattttactatggctggttttgccgatgcattgaggccggataaattcaccggtgtgcattttaagagatggcagatcaggatcactctgtggctaacagctatgaaatgcttctgtatgtgtactggtaaacctgaaggaattcttactgctaatcagcagaagcaattcgaggaagccactactctctttgtgggatacattcttagtgttcttggcgatcgtttggtcgaggtgtatatgcacatgaccaacgctaaggagttgtgcgatgcactgaatactaaattcggtgctattgatgctagcaatgatctgtacatcatggagtagtttcatgactacaggatggctgacaaccgttctatagtcgaacaggctcatgagatacaaaccatggctaaggaactcgaactccttaagtgtgtcttacccgacaaatttgtggccgggtgcattattgcaaaactacctccatcttggagaagtttcggtactgcactcaaacacaagagacaagaatactccgttgaggggttgatagcgtctcttgatgttgaggagaaagcttgggaaaaagatgctgcgtctaagggcgatggtgggctgtccagtgccaatgttgtgcacaaggcccataacaagagcaaagggaaatacaaagctcaatagaccaccaacttcaagaaggagaagaagaacaacaacaatcctaatcaggatgagaggacttgctttgtgtgtggccaacctggtcatctggccaggaagtatccacaacgcaaggggatgaaggcacctgcagggcagactaagtctgctaatgtgaccattggcaatactggagatggaagcaggtatggtaatttacctactgttttttcagttaatcagtctattaattggtgggttgatactggggccaatgtatatgtttgtgctgacatctcattgttttcttcttatcaggtcgcacggggttccaccgtcctaatgaggaatgggtcacatgcttctgttcatggtgttggcatggtagatctgaagtttacttcaggaaagatcgtgcagctgaagaacgtgcaacatgtcccttctatcgacaggaatcttgttagtggctcccgtctgactagagacggatttaagttggtttttgagtctaataaagtagtcgtgtctaaacatggatattttattggtaaaggttatgagtgcggatgcctgttccgcttttccctttttgatttctgcaataagtctgtgaatcatatttgtggcagtgtggatgatgaggctaatatttggcactcacgtttatgtcatattaattttagcttgatgtctcgactttccagcatgtgtttaattcctaagatttccattgtcaaaggttctaagtgccatagttgtgtgcaatcgaagcaacttcgcaagcctcacaaggctgccgaggagagaaacttggcaccactagaactcctacattcagatctttgtgaaatgaatggagtgttgacgaagggtggaaaacgatatttcatgacgttgattgatgatgctactagattttactatgtgtacttgttgaaaacgaaagacgaggctctagactattttaaaatttataaggtagatgttgaaaatcaacttgacagaaagataaaaagacttaggtctgatcgtgcttgagagtttttctcaaatgagtttgacttattctgtgaggaacatggcatcatacatgagaggacgcctccctattctcccgagtctaatgggattgctgaaaggaagaaccgcacactgactgacttggtgaatgccatgttggacaccgcgggactacctaaggcatggtggggggaggcattgttgacctcgaatcatgtgttaaaaagagttcctaacaaaaataaggacaaaacaccatatgagatatggattgggagaaaaccatcactttcttatttgcgcatatgggggtgcttgacgaaagtcaatgtaccaataacgaagaagcacaaacttggacctaaaactgtggactgtgtctttctggtatatgctcatcacaacattgcctatagatttttaatagttaaatctgaggtacctgacatgcatgttagtacaattatggagtctcgtgatgctaccttctttgagagctttttccctatgaatgatacacatagtggttcgagccaaccctttgaaataattcccatttcaatcacaccaccagaacaaactgaacatacacatgaacatatcactgaggaggatgtcagtgaagctcctcgaaagagtaagagacaaaggacggctaagtcctttggtgatgatttcactgtgtacctcgtggatgacactcctaagtcaatttcagaagcatatgcatctcctgatgcagactactggaaggaggctgtctgtagtgaaatggattccattatcgctaacgggacttgggaggtgacagagcgaccctatgggtgtaaacatgtggggtgcaagtgggtgttcaagaagaagcttaggcctgacggtactatcgaaaagtacaaggctcggcttgttgctaaggactatactcagaaagaaggcgaagatttctttgacacttactcacctgctgctagattgaacacaattcatgtgctactttccctagcagcctcacatggtcttctcgttcatcaaatggacgttaagacaacttttcttaatggagagctggatgaggagatctatatggatcaacctgatgggtttgtagttgaaggtcaagaaggtaaggtgtgcaaattgttgaagtctttgtatggtctgaaacaagctcataagcaatggcatgagaaatttgacaaaacattgacatctgcaggcttcacagtcaatgaggcagataaatgtgtgtactatcgtcatggtgggcgtgagggagttattctgtgtttgtatgttgatgacatactgatatttgggacaaaccttgaggtgataaatgaggttaaatcattcttttctcaaaattttgatatgaaggatttgggagtagctgatgttatcttaaacattaagctaattagaggtgagaataggattacactcttgcagtcccattatgtggagaagatcttgaattgctttggctacattgatagtaagccttctccaacactttataatcctagcttgttgcttcgcaagaacaagagaattgctaggaatcaactggaatactccgaaatcattggctcgctgatgtacctggctagtgcaactaggcctgatatatcctttgctgcgagcaagttgagccggtttacctctaatccgggagatgatcactggtgtgcgcttgagcgagtaatgcgctatctgaaaagtactatggaattagggcttcactatactgggtatcctgcggtactggagggttatactgattctaactggatctctgatgtggatgagatcaaatccactagtggatatgtcttcacactgggtatggtgttgtttcgtggaggtcttgcaaacaaaccattttgacgaggtcaaccatggaaacagagctgacggtactagatactgctactgttgaggcagaatagctgcgtgatctattaatggatctgcctattgttgaaaaaccggtgccggctatccttatgaactgtgacaatcaaacggtaattgtcaaagtgaatagttctaaggataatatgaaatcgtctagacatgtgaaaagacgattgaagtctgtcaagaaattgagaaactccggagttataacgttggattacatccaaacagctagaaacctggaagatcccttcacgaagggactatcacgaaacgtgatagacaatgcatcgaaggagatgggtttgagacccatgtgagttatactatggtggtaacccagtctatgtgatcggagatcccgtggattagaacctgggaagaactaaccattagtaaagtagaggagagtaccaatttataccctctctaagtgaagatgcatgtactctcgttgctgcaaggcaggttggcaatgccttaatgagttctgctggctttaattagcgaaggtgctgtcctgcaaagcattcttgaaagaattcacgtttgtgagcttgactgttggtcgcagtctatggagattttgggtgaatcttctaggaagcttactaaagacctaggagtatgacttatacgctccacccgaggggtagtctacagacgatctagtaccaggtaagactctgagtgaaacttgcttgcacaagacttgcaattcaaggcgtagtccattgttcaagttgtgagtaagtgtagcttggagttctagatggatgttcaaccataattggtctccatcgaaccgctggtatataaacattatattggaaaaggcaaatctcagtgggattttgagatttggtggggggattgtcggaattaatggatgggctaaggcccactcgaagattaattctttggaaaatcacaaaagcccacctcataggatagcatgcatgtggagtttagtaccaccttacttattctaggaaagggggacctccttaaaagggaggatgccctccttgccacttaaagcatgtgtggtggagagaagagggggaacacatgcgcgcgctcgctcgcctcgcctggcctggcagggcaggcggcgcgcgtgcacgacgtacgcgtcgaatggtccgcaaaattggctcctcacccttgcgcagatgcagcctccttttgcagttttgttttgttgcggaaaattcagatttgttttgttttggaaacattccaaacaatccggtgcgtgaaaatggcatggagtccggataggttatgagcgacttatcaggttcggttacgcggagtggagatcgtgcgggcgccctgatcaagcgacctatctctatgtaaaccgagccgccgtcttcacgcaacacacgcgaaatcaatctagggtttgcctcctactctatgctgcgccgtcgctcgtagactactccatctcgctcgctggcgtgcaccggcaatcgggagagcaggtctccggaacttctgccttcgacgtcctgcaccgggagaaggcggtaataaggtttttgggaagcgcttcgcgcgactgcttcctgttcgtccgcgacggctcgccttcctctccgctcgcgtgctgcgtgccctcgtcgatgcccgcaaccgcgagtagttcctgccgagcaaccggtctttccatcacctcggtacgtgttcgacatgttgcgcatatttgatctgttcatgttttactgcttagtttacatgtgtagatctaatgatgcgttcatgctagtttacatctgcaatttcatgatttatttatggaataaattaaatcattatgtgcttataatttcaacaattgcattcacatttttaagctttattttcttctctactcccaaccattgaactcttttttttaatgaaatctcaacttgctttttgcaagttctctctgttttttttgcaatcggaaaaccgttacatgttcaacacaaaactctcacttataagaactgtaactagctgagagatgaactttgataggttccttcaccaaatttatagtgccccttacaaatctgaatgctggagttatatgagatgatagatgaatatcgcagggtaaatattatgtcaccttttgacaattaaatttaactagtaacatgcccgtgctaaacgctacggtgcaattgtatatgtctttaataatttttagaatttcatgttagcaaaaaatatttttatatgatcgatgcatttgaactttaattcaattcatatcctatataaaatatatttcatgtaaggtgcagtactatgatattgcgtgggcacaataaaactttacaagatgaggctcacatgtaagtgataggagaaaaattaaaaagcgtagggctcactcgtcagccctattctccctctctgtcttttctcccaaaaaaacagcagagcaagcggcggcggcggcgttggtgatggtgatggtagtggtgcaggctgtatgtggtggatggtgatggcaatggcggtggttcgggctgtctacggtgcattattcatttaagttgtatggatgaaccatatagaaaaataataatccagaacaattttgtaagcatatgtatccctttatataatacagaccatatttacaatctcaaatgacagtctggtgcaaactgacgcatctagtgtgagatagtttgtaaaagataatcacacggcattccatataaaaggtgatggcgtgctgtaccaaacaagaggacgatggtgagtaacattcgatgagcaatttactatattcaatatttttttgaattaatttagatcatgcgaacctatctttgttcaccagtcaagaacgtttttattcacgatatttctagtgctcttccctgttgaatcaacttctttctttggcttagccaaaatctttgttgttagccttgacataccccttaacaatgcgacatatagctgaccatgtgaaaacacgggctctggaagatagatcccaacatttaggatggtttgtccttgagatttgttaatggtcattgcgaaattgagacgtattgggaattgcttcctcttgaatttgaaaggtagagatatatcgtcggagggagacaaagggatccgtgggatgaacacccttttgctggcatgttgtccaccaacaatctcagcatcaattgcattatcttgaaaagctctaaccattagtctagtcccgttgcacaatccattatttggatcaaggttgcgaagaagaatcacgggacaattgatttttactattagctcgtgtggtgggagaccatttggagtgatagagttaaggtagtccagaggataactgttgtgagggtcatcatcaacagagtcaaagctgtgataaaccttggcctgccctggaaatctgtcaatcatatccgcattcagcttgtccacataatcatttttagtggatagaatagcacgtgtgctcatataagatgcagagcttgcattcttttcatcttcaagcgagggaaacacatgattaatcaattcgtgtactgaatcctcactatccccataagcaatcacaatttcatcaggcaagcgaacataatcatctctgatagtgttttcagtgccatttctaattctaaggagatattccgaaaaccatagatcagattgagccctcatgttacgtgacaatctgatcttcctaatattatcccataaatacaatctctgtaatgttgcatcagttatctgggcccttgtcccacgtgtaaccacgggatgtacctgtctaaaatcactgcaaaaaacaataaactttcctccaaatggcaatgaacaacccataatgtcttgaagagacctatcaagggtctctacggcttgacgcttcgtcattgcagcttcatcccaaataattaaggacgacatgtgaagcaattccgcggtgccactttgcttcgtgaagttgcacatgctattgtgagcaatcttaatagggattttgaatctcgagtgtgcggtacatcctccaggcataatcgacgctgctatacctgacgtcgtagttgcaatggctattaatcccttggaccgcactctagcaagaaacgccttgtacataaatgttttgccagtgccacctgggccgtcgataaaaaatacctggctctttttattagttacatgatcaatgatctcatcaaatcttgcacgctgctcatcattaagggatgtgtatatgtctaaatggtcttgatccactagcacgttaagttcctctataatctctgtcattacgtcgttgcaacgttcacctgattagtgaaaacaaatatatgcatgatgaaactattggtgggtggtgcaaatgtaaattaataaggaaaagacgtgatagtataacaaaaaatacctatatcaatgacctcgggaagaccatactccgtgatatcctttcccatggaatgaagcaaatcatgtatgtctcgtagcaccatcttctctactactgcagggttagtgttccctcggctataatcttcagacattgcatccttgtgattgtcccatagtgcacggatatcagtgacttcgcaaaataccaatatggttgcaaataatcgatgcaaagcaaatggcatttggaaagtggatgcctcattcaaacaatcatcatgtgacttatccgtctccacaagccctctcttctcgcatgcctctctaaaggtagagtatgaagtacctgacactgtcctcaaatcttcaaatgaggttgcacctcgcacgtggttgaggagcactctcaagtagtatctctccacctctgcagggtgagcgtacacaacccgtccaacttggcctctcttcattttccttttctgccacacattctgtccggttatccaacggtagagttcagggaactccttgtatagcagcttccttgcttccgggtctacttgattcattttgaaatactccgtaagagttgtcctggtagaagatggacgatttacaacatcctcaagattaccatcctcattatacgtgacatactgcatgttaggaagatgaagttggagctgcagaacagctggatagataccgaacagtgggaaaccaagcatcctatatatagcctctggtggtgtcacgtatctggcatttctgtactgttgtatctcgtttatttccccagttggatcaaccgagaaagatgcacagtcgtgtcctttatacacatacttatagaggtacttcacagatttgatgcttgcacaagcctcaacattgatgtgacagttataccgcataagcagtccaggattatatgggaccacccacctgttgtctaacactgcacctctaatcttgacacgccatccgtcatctctcctcctatacaaagggtacgagtccttcccttgttgtgttgcttggttgaactatcgaggaaagtcgaagcgacactctccatccaccatacaagcacaattcctgttcagtgcgccgcatggtccgtgcagcatatgcttgatgacaagacgatgtagctcagggaatttggccttgtctggtatctccgtgcaaataactttatcgtactcatctggggttgtcaatttactgcctgacttcatgatcaataggatgtgttcatgtggtagtgccctcttctaaaactcagtgacgtgcgcgtaagcctgaacctccccaaaatattttttcttcacaataagatccagcacatctcgcagcttagccctaaaaactcttgcgacaaggtctggtcgatcttgaggttgctggtcgggttcgagatgttctgttatctcatcccagtatgggttgcacgtcattgtgatgaagtaatctggcctcccaaaacgctggacaagcgccatcgcattgagaaaccttcgttgcatgttgtgatcaccacccggaaaagatcgaggtagcacaaccctcttaccaactgcggaaccgcttctctccagaagaaagcacatcaaccacgccctgcaatcattaaataacaccatgatcaaataactggtatgttgaatcacagatgggagacagtgtcaatagttgtggaaatatgttacaccatttacctggtatagctcagcctgaatctttttttgcttctcaggttttgagtaccaatcaagcctcatagactcgattttgatgtacatatcaatagcccattgttggaaaagtcatcctccgaacaaaatgatgtttagaagtcccctcctgatgtgcactagggttcccgatcttccgagaggttctgataaacaacgatttgggcggagtcgcaacacaaatcgatccggcttcttgaacgcgcatgctcttgagccccgcaatcgcagcaccatgtctcctctagttatcacccgtgtcgaaacgcggatgacctcgccgagaaggctaatccttgtttgccaatcaaagaatacaaacaagaacgagatagaaaacaaccaaaattgcagatgaatgattaagctcacaaattggggtcttacaaaccgatctagcggcgaaactgttcttgaaagaataatctaagcaaaacccaaaaacctaaagatggcggtgggtactgatatatagagtttaggcttgtgcaaccccctctcgacacaaccctaatgggttccaacacgatacacgggccaaaagcccaaatacggtgacgcagcaccgggacaaattctggacgtcaacttgttcgatcaattcccattgactcgggaagaatttggatgtgggaccaaaaccattggaaaggttatgttcttagctttccatatatataaagaacgccctaatccgagcacatatgcgacctgggcgcccgttttagtgcagactggtcctagactccgaattgcacccgaggtcgaattggtttgggcctccaccttgacttggacgtcctcgatgatcatccatggctctaagtccttccccaagtgtctccttgtcccctccattgttcctaatcacaatataatcattaggtagcaatctattctcgaattcatacaaagaagaacataggaacgagctcacctctaaattcaattgtcacgcacgagctcttgttatcggtccttgaatgaccgtaggaggattgctatgtgtatccgaggtagtgatgtccgcatcaccttctaacctgcagcctgaagcaatagtactccctcgctgtgacaaacttgtcctttttcccttttgccggatttactactatcatcattatcatcttcattgtctagataattgtcgacaacctcgttctctgcgtccaaacttacataataatatacataaacaatggataaggacataaagtttagaaattattcgacaaaagccacgagtgtacgtacctggaagatcatcaaaagtgctttcttcgttggtacgtacatcacctaaagatgatgtcacactgttcatccatttccacatcacgcagaatctggttgggatcgttgtacggcattttcaggttccacccagtctccccattagggttaaataaaggatacgctaaagggtcataacaaccatggtatgctttgatgtaacagggcttatcaccttttgcatgtaccaagacttgtctatcaaaagttctcattggatcatccccatcttcgttggtcaggcgttacattagtgttgagctcaatcatgtagtcatctatattgggcatggatccaactctgctgaaggtctgtacgtacggcttttgcgccaaaatacgtacaatgacccgaacaaggttgatatcaaggtcaggagacctgcgaaccctatgggctagtgcatcagcatcttctgtatcataaaagtaaagctgcatatggcgcggcccttgagaacctggaaccaaattatccaggcgatggtacaatgcaccgtgcacacgaaatgtatacacaccagttcccactacagtgctgactcgttggtcaagggtaactccaaggctcgtgaatgataaatgggagttgaaatactgtatatgatttctgaaatactttgcatcattatgcacttggctgataaacaaccgtattgcatcattatactttctgaaatactttgcatcattatgcactttgcatctaatgatgcgttcatgcttgtttacatctgcaatgtcatgatttatttatggaagaaattaaatcattatgtgcttataatttcaacaattacattaacatttttaagctttattttcttctctactcccaaccattgaactcttttttttaatgaaatctcaacttgctttctgcaagttctctctgtttttttttttgcaatcggaaaaccgttacatgttcaacacgaaactcacttataagaactgtaactagctgagtgatgaactttgataggttccttcaccaaatttatagatgccccttacaaacctgaatgctggagttatatgagatgatagatgaatatcgcagggtaaatattatgtcacgttttgacaattaaatttaatgtagaatgattttttttcatgtatactacattttgtttgattaacttgatatccgaattgtgttttaggagcctatataaaattatggtgtgaaatacaaaagggtcaagcatgtttctcacggaacttctgacactagatatttttttctgtaccttttatatattttgcccttactatttttctcaacattggtagggttagactcggagaaaaaaataattgtagttgctattatttaatattgctttgcgtgcatccggtacattggaaaaaaacatttttttcatttccttcgggtataatactacaatgttcagataatactcttcatctcagtggatgatgacaattcagagctagagtttctagagccaaagggtgaaaatcatgggcttcaaggtttaagttgcatcttacgcactactgcaccaacagggccgtctctaggatttgggtgccccggaacgaatgcaaattgagaccctaaattttgaaaaataatatgttatttttagttaattatataactttaatgtgttattttctacgatatatagaaatatattttcaaatattaatggtaaaagagtaaaggtagtactgatctaatattccagtgagaagcatcatctggcgaggatttgaggtcttcctgttttataaaaaaagtgaagacgttcacattacttttgattcaataattatcaatccaatggaatgatggatcattgaaaatactgtaacagtgtaatttcattagccttgattcaaagtaaattatcgattccaggtttccaactagagctgggcctcgcggcctcggcgctgctctgtgtcagcgcgccgctcgtcgtttcccgttgctccgctcggcaacatcagcgatgtgctgcctgctgccgtgaggcgtgatgctgtcgctgccgcctgtgctgcacacacgcagcaactcgcgtctctccgtgagtgaacactaaacagttactctgtaataattggctgtaactcgtttgcgtctagcatagttcctaactccttgcctcctcacttatgggccgctgaattcaagccaggctgtaggcctactccgaggtgggccccctcaaaaattgggagccatgtgcggccactgtgctcgcgcatggccttcgatggccctgtgcaccaacctactcataccatttagaaatcacttcttatagtgttgtggatgttagattattgtcatagaaccaattaaattttgttgacctcctttgcgctttaagatctacgaatatgttttctcctaaatctgtgaggctgtgcaaacgcatcctgaagatcaacatgtcttaagttacataacaactagccatgtactgaccatgtctgctctaatggatgatggtgtatgcgcaacatgttgccttagcagacaatgtgttttactactgatgaaaggtatttatgtattgtaccgaacacgtgtactttggacctatttatgtatatatatcatattgataaatgtttgaacaatctaattctctttcttttcttttgcgtgatcttaaaactatattgcgcattatagtcttaatcactaaagcatgcattgtatatatttttggttggctaattattttattaaatgtcaccgtagcgttagtacgagcaaattactagtttccaaaaggtgaacaaagagactggcatcctgcctaacaaaaaatgtttaccaattcaaataaatttgttcactcattttatttatgttttggttataaatttcagctggaagtcctcatgtgtagttgtttggagaggagaagtacaatatcatgctgattgatctttttggtccaattctagaggacctaatcaacttctgcagcaaaaagttctctgttaaaacaacttatgcttgctgatcaaatgatgtttttttttcttactgaattctattattgtgtatgttaattgttgtttctaatgttttcgacttggttgaggaacataaagcattgttgattagctgattacctccattgtgccctttgaagattataggtaccatatacccatgtggacagcatctctgacgggagataggtggtgggccatatacgtatattatgtaaatagactaagctttggaaattacattgtcgtgtttcccaagacatgtaccatacgttttgtagcatacaattatgtaaatgtataatggaaccaagtcgtgtccaattgggttctctcctttatatccttgcccctgaagctatataaggaagacatggagtccctagagcatctctaacagtctctccaaattgtcagggttacgggtaagatataccctctacccttcgatatacgtcacatatcgatatggtatacttgcgcgtatacggatgttttcggcataagttaaggaaattcattatgcaagttcatagatggaaggaatcctactcggacagaactgggtcgtcattgtatcgtgccgggcccgatgtctccgagtcctacttggagaccagttgacctgcgatataaaagggaccccccgggagggcctaagggatcgaatcttactggcaacacatccaccacagcctacgaagcaagagcttatcggagccaagtcgccgggagatctagtcgaatcaactcgactacgatcttgtcggtatcgccgagttccactattccctttgtaatatgttttttccatcatattatcccgtatcaactggattaaggctattacctatcaaggggcctgaaccagtataatctttgttttctgcctgcttgatgtcgtattacgtagagactcgttccagcgtaccctaatgccctctatatccagtctacgggtatcccccgttgatattggcgcgccaggtagggggacttggtgctcaaggttctactactatgacatccagcttcgtcgacaacagcgtcaacaccaacctcaaccaaggagttcctacttcaacaacactggtgtggactcaagtcgggtaaatcgtctttccggtttacaccacagtgccaatctcagctggtccgccaatggccggaaatgagaacgcagtgggtacaacccgggacgactccatgtcgaaggatcctcccgccgaagtggaaatcgaaacttcgacgacatccgagcccgagaaggattctagtgcggccaagccttgtctttccgacaggaatcacgagccgacgaggattacttccgaggtgacaaggtcctggtgtcctatccacaaaaccagaaaacacaccttgcaagcctgttgggtttttctgaacgtccatgctgaaattcgtgcctgcaaagagcgtggaattcagcgtacctctccaactcgtgatgtcttttgtcctatttacaagacaaagaatcacaacctctcgagctgcaaggtcttttcagcgccatgaagacaccacatactaaggtccagcagtcatgcatcccccttagggatgaggacaaggaacaaggagcgacgccgatttcagatcgatttgttgggtaatcgacatcgatccccacgaaccatcagtcttgcacctgctcgaaggctatggttcatcaacaacgagtacgccgcgtgaggtattggctatcgacgatgtcggcacgtcagcacgcaccaatgcggaagcggagaatcaagtgactacaccggcctagcacatcagagccgtcaatacaatactgagggaaacttcctacaaccccgttctgaacgacgatctcgcacgatggacagaatggttacgagagttagtgaccaacctcagcaacgcgttcgaagaggccgctgctgcggcgcacccggaacagccaccaactggcgatgctaatggtgaaaaccctgaacggcgggaatcgcctcatcgagccacccctccacctcgcggcaccggcgatctccgcgatcacctgaatggctgccgagaggcgcgacgcacacgagacaacgagaaccattctcgacattgcgtctcttcatagcgtcatgataacgaagatcgaggaggccgtttgagcaaagaccgaggccatgataaccgccacaaccgccgcgatcacgacgatcacgaacggcgggggctgggcgatactggtcgaggacgtcgccataatgacgacgatgatggagatcggcactgagacaacaacaggcgacgacaacaggattctcgagaacccgaccgacgtcctcgtaatcgtgcgccggaaccaagcgacccatcgtcatcatcgtcatcctcctcatcctcatcatcagatagacatccacgaaggacatacgatcgccgacaacccaccgtgcccagcgctgggtgtagagctttcggtcgttcacttcgagatgtccgatggcctgaaagattccgactaggaacaatagagaaatatgatgggagtaccgatcctgaagaattccttcaggtttactctacggtactctacgctgctggagcggacggcaacgtgttggcgaattacttgccaaccgcattgaaaggctctgcacgttcatggctgatgcatctcctcccctactcgatctcttcgtgggcagacctgtggcagcagttcgtagccaacttcgaaggaacttacaagcgccacgcgatcgaagacgacctacatgcattgacacagaacccgagtgaatccttgagggattatgttcggcgctttaacgagtgcagaaacacaatccccggtatcaccgatgcttctgtaattcgcgctttcaagtccggtatcagagatcgctatactactcaggagttggcaacgaggcacgtcacgactactaggagattattagaaattgtcgatcgatgcgctcatgcggacgacgcactgagacacaagaacgacaaaccgaagaccagaggagagaagaaaccagccaaggacgcacctaagtcaagcaagaagaagaatcacaagagtaggaaaaggaaagctcaatcggaagttctcgcaacagaatacgcggaccctcccaagcgcccagacccacaaggcagcgacgcgaagaaaatatggtgccctatacacatgtcagacagacactctctagaagattgcctcgtcttcaaaaagtcgctcgcaaaacacatggcattggtaaaaggcaagcgagtacttgtggttgagaaggacgctgaggcggttactcaggaatcagactcagcatatccagactccgatctccatgtctcgcacatcttcggaggttccacggcgtactcctcaaagcgagaatacaagaaggtggaacgtgaagtctgttagatgtggcagggggctgcgcccaagatgaagtggtccgagcagaagatagaattctcagaagaggaccaccccaggactgctgtcatcccagggcaatatccgatcgtggtcgaacccactattcgtaatatcaaggtcgcacgagttctgatcgacggcggcagctcaatcaaccttctcttcgccagcaccttggacgcgattaggatcccacgaagcgagttgacacctaccaatcaacccttccatgaaatcactcctcagtcatcgtccaaaccattgggcaaaattacgttgcctgtgactttcagccaagcaaacaacttccgaacggaacagatcacctttgatgtcgctgaattcgatacagcatacagtgccatcattgggagaactgcactcgcaaagttcatggccgcatctcactatgcgtatcaagtactcaagatgtcgggaccgaagggaacaatcactattcaagggaatgctaagctggcagtgcaatgcgacaagtagagcctcgacatggtcaagcacacgcctagcccacctgccacagctgaaccacccaagaaagtgagcaaaacaaacaagacgccgaaaccggacggcacaatcaagatcgttccactctccagtaccaaccccgacaagatcgtcaagatcggagcatcactaggcgagaaataggaactcgcgctcatcaccttcctccgcgacaatgctgacgtgttctcttggcagccgtccgacatgctgggggtacccagggaggtgattgagcacaaactcatggtgcgacccgatgccaagccagtaaagcaaaaactgcggagatttgcaccagatcgaaaacaagccatacgagaagaactcgacaagcttctcaaagccggtttcatcagagaggtactccatccagagtggctagccaacccagtcatggtgcggaaggccaacgggaaatggagaatgtgtgtcgatttcaccgatctcatcaaggcgtgtcccaaggatcacttccctcttcctcgaatagatcaattggtggactcaatagccggttgtgagttgttgagctttctcgacgcttgctctggctaccaccaaatcagcatggcgaaagaggacgaggagaagacaacaatcatcacgccgttcggggtattctgctacgttaagatgccattcggactaataaccgcaggaaacactttccagcacatggtccagggcgcacttagcgaccaactcagaaacaatgtcgaggcctacgtcgacaacattgttgtcaagaccaagacaagtgactcattgattgacgatctgcgggaaacgtataacaacctccgacgatatcgcctcatgctcaatccagagaagtgcacgttcggagtaccatcgggcaagctactcggcttcctcgtctctggtagaggaatagaagcaaatcccgagaagatcaaggcaatcaagaacatgaagtcgcctacaagactcaaggaagtacagaagttaaccggatgcatggtggcactacgtaggttcgtcgctaggatgggagggtgaggacaacctttcttcgctctgctgaaaaagcaagacaaattttgatggacacaggaagccgaagaggcattcattgcactcaagtgctacctatcaaatccacctgtacttgttgccccccaacctaatgaagaattatttctctatattgccgccacgccatatttcgttagcactgtcattgttgtcgagagagagaaggtgcaacgaccagtctactatgtcagcgaagctctccacgacgcaaagacaagatatccatagatccaaaaactgctttgcgcggtaatcatgacatcaagaaagctatgccactactttcaagcccacagggtcacagttgtatcctccttccctctcggtgaagtagtgagaaacaaagacgttgtcggccgcattgcgaaatgggtagtcgagctaagccagtttgatgtccgctttgtgccacgaacagccatcaagtcccaggtacttgccgacttcgtagccgattggactatgcctgataacaggtcagacaaccaaatcgacaacgaaacgtggacaatggcgttcgacggcgcactcaacagccaaggagcaggggcaggattcatcttgacatcacctttgggagatcaattcaagcatgcaattcacctcaactttagggcgaccaataacatagccgagtacgaaggactactcgccaggataagagctgcagctgcactcgactgatcgtgaaaggggattctgaactagtcgcgaaccaggtgcataaagattacaagtgctctagccccgagttatccaggtatctcgcagaagttaggaagttgaagaaaaggttcgataggatcgaggtccgacatgtataccgcaaagacaacatcgaaccagatgatctagcacagcatgcatccagacgagagccattcgaacctggcacctttctggacgtcctgaccaggccatcagtgaaagaggcaagcggcgaagatagcccggtcgcccccaacatcagctcgggggctacagaggcagagcacgccattgccgatctcgagaccacggacgactggcgcaccccactcattaaattcatagatagcgaagagttgcccgaggacgacgcagaagccgagaaaatatcccgtaaagcaaaagtctactgtatgatcggcaacgatctatacaagaaggcaccaaacagggtactcctaaaatgcgtctcgtccgacgatggcagacacctcctcctcgacatacatgaagggatctgtgggtcacatgccgccggtcggacattagtcagaaaagctttccgacaagggtttttctggccaaccgccctcaaagacgcctgtgacatggttcagcggtgtgaagcctgtcaattccacagtaaacacacaaagctgccagcgcaagcactctagactatccctctcacttgaccgttctcgtgctgggggctagatatactcgggccattcccacgaggacagggtagctacaggttcctattcgtggtgatcgacaaattcaccaagtggattgaagcgacacccacgggggaaatcaaggccgacaacaccatcaaattcatcaaaggaatattctgcagattcggattgccccaccgtatcataacagacaacggctcctagttcatcagtgccgatttccaggattactgcatcaggctgggagtcaagatatgctatgcctcggtttctcaccctcagagcaatgaacaagtcgagagagcaaacggcatagtactacaaggaatccaagacccgcgtctacgacaggctcatgtcacacgacaagaagtgggtcgaggatcttccatcagtactatgggccgtgcgtaccacaccgacaacatccaacaaggagacacccttcttcctcgtgtacggctcagaggcgatgctccccaccgagctacaacatcaaagtacacgagtacagaagtattccgatgaggatcaagaggagcagcgatacgatgatgtgaatctactcgaggaacatcgcgaacgagttgccgttcgagcagccagctaccaacaggcccttcgccgttaccatgagaagcgcatccgagcacgcacgctttcgatcggcgactacgtcctccgacgggttcaaagccaagcagggggaaacaagctctcacccaaatgggaaggaccgtacacgatcacacaagttctgcggccgggcgcattcaaaattgcagacggcgatagtcgcgagttggcaaattcctagaacattgatcaattacgtaaattctatgtataagtcaatagtatccatacttgtaagacatcttacaacttcaataaagcctattttcaggtacagactacaatcaaagtgttccttcccgatgatcccttacccagatgacacctagcgttgaaacctatcctcatgtccctttacgccgtcttgacaaggcctccgaggaacctaagggaacttcggctggggacgcccagagccgataaggccttatcggatcctgtagagacgacagaccatgtaagatctggtcgtgtaagagttctcgccgtgcgtattaaccaagtcgtgtaatcggaaataaattttgtaacttcatggctgggggctaggatcagtgcttgttcaaccgaggcaggtcaaaggctgggggctagggagagtgtataactcaaacaactaatcaaagtcacgaagtgagaagacactcatacacgctacatccagagtaagaaagcttagttagatagatttcttttctattttacaagtacttcttacagttccataaaaatccaaaattatattacacttttcccctaagacatttgtcataggacacggagactaccaggaaggccaacgccagtccatagactggaagaccttttccgccagcggcgccatcgacttcgctaggccatctatctccgtaggagttctccgagagcgagaaaacccttcgtggaggaactcgaggtgcagctgcggacgatgatctcgtatacaagccaatacatgccccccggcatatcagctcgatcgacgacactcctgcttcagggcctcgtcgatatgctggccgatgccctcgagctgggcgcaggccccattcagccacgagatgtatccagccgccgattcctcgggatccccacggggtactcgaagctctctaaagactcttgacatggaggtacagcaactcttcagatacgagttgaaccacacctcgcgaccacggagtgtctccacggcctagtccttcctcacttccaacatagtcctctcgagttccgcgacctcaaacttcgtcctccaatactggatgcgacgatcctggtcagcaagcgcactctcgaggtctacttagtatggaaacgactaagttagactgctcttctcttccaagaatacagcgaatcaagtcgatccggacggaagagtaaagtggatgaaaacaaagataaccaacctaagggagccgttgccatgctcatctccacaggcgaattttgagctacatcgccctccggcacatgtggctcggacgcaagtaacggaacgaccactggcaactcaggctgcccgcgctgctggacatcctcgacatcaacatctctacaaatgacaacaaagtactcaagatcaaaatactgcacacacaaaggtggtttgaaccaataagagttttacaaagcatggctaaagagtacaagagagctaagatcctactcttcaaaaagcgggaggacggactcccccaggtcgccgacctcctccatcacatccttgcgcgcatcgctagccgccccctgatccaagatcttccgcagatcgagttcaggatgcgccagcctcacacacgcaaggacatggcacgccccggtatagatcccgttggacgtctcctctccgaccatggccgcgtgcttggaggggatcacctccatcgccgttgccagttccgcaagcgaagacgacaacgagaactcgttgggattcgtcgggatggtggccttgacaccacactacccggcgagctggtgcatgccggtgtaggtgacctgcagtgagccacggatctctgacaaatggttctcaagctcagacatacggtgcttgagcccttgccgttgtcgctcattgccagccaccagctcccgcatcttatggaggtcctcgcgaacctccgctaaatcgcgcgcaagccgatcagcacgctcattcgccgacgacgccgccgccgccttcacctccgtgatctcgtggccaatgccacgagcaccagcctcgaggaggcaccccatctcgacctggagctcctcccaggtgagaacggcagccggcagaccccgaccagccgcaagatcgctagctaggccgttaggtgtcgcctcgcggctcctaggcgcgaccacgacaggagacgcgttggaggtccctctagacccatcttgcgccgcctttggccgcgccgccctgcgtaaagctgcaactgaaacaggctgcaacagtttgacaaagtgacaagacctcaaagtcaaccacttacttctcgccaagcgtcactagccactgccgtcgtggaggtgtgggagatgcatccgaggcctggagtacaaccgatatgatgtgaggtagaagctttccgactacgcgatcaaagggcaggagaacttaccgagggggtggacgtcttccgacgatgtctgaccacagaggagaatgtcctcccctttttcggaacgttgccgccgctcgttatggcagcggcagcagcagcgtcagacgcctccttggcgactttctccttcagcgacgccgccaccagatggtccacaagtggctcgatgatatcagtcagagggagagcctacgcttcatgaagtcataatgcgatcccggaagaaaaatgcaaaaggaccgctgagtacacttacattgatggcaacgtcgtgctcggctgcccctttctcgcaaagggggacggggacgttgctcgccgttgtcgggccactgatcataagttggctgacgcggcgctcctagcctgtagatcgagaccagaatccgataagccgggaggaacacacgcataagggagtcaatttaactaaaaaggaaaataccccgaggagaaacccgggtcgcgtcctctggcccagaataatcaaaggccggatggtctcgagcctgaagcggctggatccgcctaccaatgaagtcggcagcgacttcataccccgacaacccctgttctcggaggtcgtcaacgatatcgatgaaagattggagggatggggtcaaggcgggtttggtggcccaagatggaatcttgtttggttgctcctcaggaacaacgaagaccggatccgaatcctctatctgaagatagaaccacctcccccgccatttgctgcgagatgaggggcactggaaggggatgtatcgcgacttcaggccatcccaaagtcggaaaccaacacacccggacacctttttgggttccatccagcgtaactcatagtaaaagcggaagaggtcaagaaacggctctaccccaatgtaggcctcacaaagatgcgaaaagatactcaagaaggcgatggaattggggttcaagtggagcaagaaaacaccgtagaaattcaagaccaagagaagaaattcagaaggcggaggaagaaaaccacagagaataaagtcctcgatcgcaaccatgcgacccaggacaggctggggttcagtacctcccacttctctctccgcggtcccgcgaccgggaagggcgccatcttcctgcaacttcttcagcgacgcgctggtggaggtagacttgtcaagatccatttccgccggggatcgccggagaaaggaccgagatgagctagctagggttttttgtgggagcagagaagacgagggacgtttgaaagctggtgagttttttcacaacaagcgggcttcaacttggatccccaaaactctcttaaatagacgcacctccgacggtgcgaattctaaggaaaggagagagatggccgccggaaatttctgggtccgttacgcgcggcagttttttggacttcaatttaaattcactcatgaccgttgagcttcacccggcgttgtcgatcactccttgtctctcggtccttacaccgagaacaacgacaacctcgacatcagaagtcgcgatcagtttcacgagttcatttaagcagaagtcgggggctactgttagggttacgggtaaggtataccctctacccttcgatatacgtcacatatcgatatggtatacttgcgcgtatacggacgttttcggcataagttaaggaaattcattatggaagttcacagatggaaggaatcctactcggacagaactgggtcgttattgtatcgtgccgggcccgatgtctccgagtcatacttggagaccagttgacttgcgatataaaagggaccccccgggagggcctaagggatcgaatcttactgccaacacatccaccacagcctacgaagccggagcttatcggagccaagtcgccgggagatctagtcgaatcaactcgactacgatcttgtcggtattgtcgagttccactattccctttgtaatctgtggtttccatcatataatcccatatcaactggattagggctattacctatcaaggggcctgaactagtataatctttgttttctgcctgcttgatgtcatattacgtagatcctcgtactagcgtaccccaataccctctttatccagtctacgggtatcccccgtcgacacaaatctcactctccatttgtctatttggccaactctccatctaatttatcaagtctaacttgatgtttgctccaacagcctctccattcaccctctctactctgaatctatgacagtgggacccacatgtcagcctctacaatcctttcttcttccccatattccttccttttccccatgcttcatactctcatgaagatcaacagatggtgatggtggacaacagattgcgatggcgatgatgatggagatcaccggcctcctcctcctcaaccggcgtgcgtcgtcgagcctctcttgctgtcgcgccctccttgcagcaccaaacaggagcattaggacggcctccacagcgtcgtcggacgagggaggagatggcggcgggggagaggctggaggggaggtcggaggtggatacagtgaatctccagtcaccggagtagcgggagagggtcctcacctcggtgcccatgaagtagcgggattgagaggaggcgcacagcggtggccctcttcactgctggtctcccatcttgtcgccggcgatgaagccgaggcactccttgccggctgcgacggcgagcctccttcccgtggcggcggtaggcatgggaggaggaaggaggggcgtggcagcaataggcggaggaagggagggcacgggcagggatgtgcggatggtggagagatagaagggaaaaagatggtggggcccacagatagctagttgctgtggatggccaacggctggccaaatttagctagcttgaccctatctttggccattgctattttttggctagggggatagccattctattggagtgcattttttttgtccaaagttgctaaaatttagcttggagagtaggatggagaggttgttggagatgctcttaagggcataaccacaactcgatcatcagatcaatacaacacccggtggattcaatcctcgaaacaagagtacggtattagttttcatcaagaaggcttgaacctgtataaacgtttgttattttactcatccactttagatctcgtccccctttctcattgttgatttctagaatcaatagttggcaagcaaggtaggggttgcgtagagtttttcgcaaacaagtgcaatcggattaattctgagagccggcgactccgctttccatccgggctaggcatatcaattcggtgacatcgacttcatcaccgatgactttgtcaagatctctctactcgactcggatttgaaccaatcagggagggaccccatctctttggcctcgttcagtgccccgaacactgccgagatctactcaaggattctcacctctgagttggcttcaaaccactgagggaatcgtcatcatcaacaaatcttcacagcctatccaacaatgcagcatcccaagagtgccatgcaactccctccgctcctcgccatgactttcgggatgatcaacctcctctccaaggtcacgacccggccaagtcccaagtccacccgagatcagaactagggaggcgggaatcatgatcgaatcacttggataatatagcatgtcatgcccggaaaatagaacaatatattccgtttgtgagtgcataaatccttgtccaaggaggcaaggtacacattacaaagttggtaaataatagagtatataagcgaaagcttaaatagagtactttattacatgggcgaccaaaagcccaacaatgaaagataaacagtaaaaagccagaagctacgagagtcaccacaggcgcttgacggcaggcacgagctagacatcaaagccatcatatccgaagtactcctctgctagaaggggggaaaagagcaaggctatgtacaaccaccgtactcagcaagccatgtcatgaaaatgcagatataatgcaagggagtacaaagaattcatttttaaggattttttttgcataaaactagcatttcaaagcatttaaatatttaaaggcatttaaataaaacacaaacctatctctagtcaaattattttcaagccgcacaccaatgcgatcttgccttaactcgtgccaacaactgacaactccaattacgcaattaatagaactaaattctaacttgggtatattgcaacacatctttctcacatgttgccatgtgccacatgccaccacggcatacggacataagacatgacataacccacctcttagtaccgccctaaacaaagaagactgatatagacttcccccaccaggtgccctgggtcgagcagacagtctatgccccctggcgtactgccagagtcatcgaccccaccaagggcttcatccatccctatccgtgtcttccttgtacatgaccgtactagatgatgcgttaagccctacccatcagacaggtggctgtacagcatatgctttgcaacggaggttcgaagacctgtcctaatgacggccagggtgcgactagcgaaaccaagcaccctgagcccaacccaaaatatgtttggggaattttgaaggggaacatcatgtcatggataaacaaccactgaaccatatttaccattctttacaagttattcccaatttgtaattattggaaaacatctaattgtttctatttaagcagcgctaagcatattcctaaatttactagtaagcaccacatatataatgttatgactagttttatttttcctagagttatcaaggatcataataatacaaataataaggctataacaaggagaatctgtagggctaaacaaaacaaagataagcgtcggaatttaataaagcaaaatgcaataatttagataaacataattttataaattgggacaacaatatgatcaaaatgacatgatttgccttgctcactaccaaaatcttctagatccacttcaaggtagagcggctcttccagatatgcagcatctatacaatatatgcaacgaaaaaggcccaaaacataaataaaaaccatataagatgcagtaataaccctaaaaatgggttcatcactgtttaaggaaaacaatagcaatatgaatagatcggttctgaattcaaacagtcaatatatggtcatttaaattctaggtgttgtttgcttggcattttactaatttatgaattaattttgtaaagaaaaactactgtgtgtgcttgctgcctgtaacagcagagagggggaaacagtagagagggagagagaggtgtgtcaggacatggcagccggcaaccccggctatcggtcatggtgcagcggtgcgcgacacgagagatgcgagggcggcggcgaggctcacccaaacggctggaacggtgaggaaacaacgacggcgatgaggaagaggatgatgccggctcgggttgacgtcggggatggagctccgaggcttgccaagctcaatgaaggcgtggccgagggataggaggagacgacgaagctagcggtggcttcgccgggacttggcgtcatcccgaccgacgtcgagcggcggctggagtgcacgctggcggcagtacttgaagagaaacggcgatggagcgagcgtggcgctggagcggcacgtgcaatgggaggaggtggtctctggggttctaaatatgtaggcaggaggggaggaggtcgaccgtgaggatggcaaatggctccagtggcagtgagtctcccaatttagtccatcagttaaagaattcgattgagtgcgatttaatacgagattgaatgggatttgttaggggaattgatgcccgctacacaagaaatagatttgcaattaatttggaggcggaacgataggggagggagatcaaaggaggcgggagtgttgagtttcatgggagagagaggaatagcctggcttggaggtaggagatgctcctgacgagcgggacccatgacggtgcgcgcgtgcatcgcatgtgcggcgtggcagcgtcgcctgcagcaggagcagtggctcggctgggccggggagggggcggctgggccgggccgagaaaggatgggaaagagagggaggggaggaatttaagccgagggggagaggggaggaatttgagccgaaaatggcccaagaagggggagacgactcccggtcgggtgcccgatcgggagggggtaaaatcggacgctgacgccatcgacttacgtgaaaaatttctttaaactaatttttctcttaaattacttatctaaatcatgatatgattgcaccattaaatttgttgcaattaaatcttcaaaacaagacctcacatagatatattctgacaaaaaaaatttagattattattgaattatttttaaatgttgcacgatgttccactaggtatatcggaattgtttcactaagtagatcgaaaatgtttcacacgtttaaatcgggtgttgtttcaccttatataaaaacaatgtttcagcaaatagcgaaagaatgtttcagttcactgcaattttagggtgattttcgggtgcgacatagcaccacggaagttgtcaacaactttagttttttagatggctacaacgacttcgacattgatagtctcagtagctacaacgacttccgaatttgagctttagtttttcttcaaagtcttcattgtcggtggcaccacagagaaagacgagcaaaccggcatcactagggagcaagaggaagcacgtgccaaagctgaggaggaacgctagtgaaggcagcacgatctgattagaagcggtcacattgcacacaacatcatccaaacccgcatagaagacactaatgttttcgctacacctcaatctatacatagtgaaacattgtgagtacactaggtgaaacatttttcagtggaacaaaacataaaccaaattcccttaataggggctttcaaaatatgtgggtttcttgttgcaatggaatgtttcattcactacaacattagatctatacatagtgaaacattgtgagtacactaggtgaaacatttttggtggaacaaaaaataaaccaaattcccttaatagagattttccaaaatatgtgggttttttttttgcaaaagaatattttaattcactgcaacattagatctataaagagtgaaacattggaagtacattaggtgaaatatcttttgtggaaaaagggagggagaagtgggtgggcccaacagtacgcacgtgggggaggggcgcgcggggggagcgcccgatccggctccccccgcgccggtcgcccaacgtaatgtattttcgcaagaagggcgacgagatttattttagtttttctttttttaataaaatctgagaaaggttattgttgcattaaaattatttattatgtaaaattcaagtaaaagttgtttaaatattttgaagcatgaggaattcaacaaaaatacccacacatcaatttgagttgaaacatggtaatttttaattgttgaagttaaagcccactaagtctaaaactcaacatgcaaccataacacatcatcacccactagtaataattacatatttaatctcatgtaagcatacaacatcatctacaatttatttaattttacaaatcaaaatacaagcatatctaatcatcacctctcatatcatttgcacaatattttaacaaatctatctatacttatcaatatgtttcactctaaagcacgggttccatttgactgataaatcctgatgtttcattatttttttctttttactccaaacttgattgacaaaaaaaaattaagaattgtaattcccgcagcaaagcgtggggaatcacctattttacataaataatttagacgataaaattttagggtgattttcgggcgcgacatagcaccacgaaagttgtcaacagctttagttttttagatggctacaacgacttcgacattgatagtctcagtagctacaacgacttccgaatttgagctttagtttttcttcgaagtcttcattgtcggtggcaccacagacaaagacgagcaagccggcatcacgagggatcaagaggaagcacgtgccaaagctgaggaggaacgctagtgaaggcagcaggatctgattagaagcggtcacattgcacacaacatcatccaaacccgcatagaagacagtaatgttttcgctacacctcaatagaacgctgtggtggccgtcacgttgattgacacccacatcgacaaagctccagaaaacatgactttgatgttgaataaggtcaagactatgatcgtcgccactgcagcccaacaagaaaatgatgccggagcttctcgccgaccgaaagaatccaatgctgactcccccaggactctggttggctgtcattagccctcgaatcatagatccaggggccacataaaacctgaatatagcagaggtcacaccgcttccatctagcatcaccaagaaaacagaggtcggcatccagatcaatcatgacaatgtcgagccatcacgacgaccgagaccatgacgaaggacacagacgttgaatacccaaatacttgaggattacgctgaaccaacgtcatcacgatcgggaaaattgctctcaccgtaaggatcaactacgatgacaaaggaatcctagcttttacttgagatctgtatcgagtggattggccgactggtttcaaatcaagagggattgaaaagtacgatggcaagaccgtctaaaccctggccatttgtgcagtaggaggagacaacaaggcactggcgaattacctacctatggcactcgctgattcaacaaggagctggctaatggggcttccaaggcgatccattgattcctgaagagagctttgaagctagttcatcgtcaacttccaaggcacctacgagagacgcagtactcactttgacctataccatgttgttccaatatgtctcttttggactacatctgacatttctcggaggcccgcaacaagatcccgaaggtcactgacgatgttatcaccgctactttccaaaaaggcattcgagacaagttacttattggcaagttcaatcgcaagccttcgtgaatagtcatgaagctatttgagactaccaactcctacgccaaggcagtggacactgtcaatgcatcataggaggaaaagtagtcgggtagctattggcgcccctagaagaataataactcaacaaccagaaggatcgcaagcacaaacctgaagacttggtggccacaacatctaattagcaatcacaacgtcgtcccaaccactgcgataaggttatgaatgggcaatgcctaaatcacccgaactcaaagcacaggtggccaatgactgcgacaagcacaaaaagcgcaactcaagatcaccaatggcgaaggaacttctgggcaaaataaaaacaacggagaagggccttccaagatcccaggaccgagtgaaaccacatcttcggaggcccacccgcctacgaatccaaaaggaagcagaagtcgaccgatagggagatcaacaccatctagccagaagtaccccaatatttatggtggtccgaggtagcaatgatgttcgaccgctcggatcatcttggccgagtggctcacccggagtggtacatcctggtacaagatctagtggttcataatgttaagttgaagcgtgtcctcatcgacggtggcagcgcgctcaatatcctgttcaccaagacactggataagatgcagattccaagatccaagatgaagtcgagttctgctccgtttcatagggttgtccctatgatatcctcaatgctactcggccagatcagccttccagtcaccttcggactcggaataatttccagacagaatatctgctttgaagttgctgattttgaggcagcttattatgccatactgggaaggccagctctagctaagttcgttgtcgtcccctactacacctacttgatgttgaagatgccaagtcaacaacgagttatctcattgcgtagcgacgtcaaacaagccgtcacctccgacaaggagagctgcgagatgacccaatctcatgggagggcactcgaccagcaagaggtctgactcgttgcatcaacatcacatgaaggtgaattgcctgccaagaagatactgaagtcaagagaaagtgatgccaagacaaagaagatcccacttgatcaagccaatccctccaagactaccataattggtgccgagctaaattgtaaataggaaaacacactcatcatctttctttaagatagtaaagatatatttgcttggaaaccttctgatatacttggtattcctagagaggtgattgagcactcattaaatgtgaagactgacgcaaagcatatcaaacaacgactccacctattcgcacaagatcaaagagacgctatgaagaaagaacagagtaagcttctggcagctagattcatcaaggatgtttaccatcccaactggctagctaaccctgttctagttctgaagaagatgggacaatggtgtatatgcatgaactacacggatctcaacaagtattgcctccaagatccctttggattacctcacattgatcaagtcgtcgattcgacggccatcagcgaccttctcagctttcacgactgctatttgggatatcatcaaatcagcatgaaagagtctgaccgcttggagacctcgtttatcaccccgttcggagagtattgttacatcacaatgcctttcagtctgaagaatgttagagccactgttaatatttcttaatgacattactagaaatataattcccagcaatggcgctgaagtattctcggtatatttatggttacagatataatccgcaagcgcatggatatagcattgtagcatttcacccagaagtaatccaatgtatcgtatttatttaatccaagatatgacaagagagtaccatgctaataatttatatattacttgcataaaccaaagtgtaggtaggggttaatcaattcataggtaggataaagttgacacacacaagaaagaaccaagatactctcactaaaactatcttattaagtcgtgcattcgtacgactataaccttaacctctcttaaatatatttacatattgtttatagcaataagtttaaatttataataataattaacaatgtaaataagtgtgtgcacgacatacttcattttacataaagtgtagctataaagccctttatatctatgccgtaatatatgataatatattctatttttatttttgttttttttccaaaatcacaggacacggcagcacatacatttaaataagggttgtgctgaaagagacgtgcatgagcgtaaattttgatgaaaagatagtacattgaaaggaaaattttgatggaaacaaaagggacattagagggctcatggtattgcattgttcattgatgaaaaaattacagattttacggatgctaaactcaataactcaagaatgttcagctgagaatacaaaatcattccagtgaaccctgcatgcatcctcaaaaatcttctctagtttactcctgtcaaataattgtagagaacatgcaaagcgacacttgtggttagaaaagctccgtaccattgattcaaagcacaaagacgtgttaaaaattctttaaaccaacattgcaatagtaacttaaaagcatggacagaagaaaattgaacctctactatttacgacagattggaagcttgataaaataaaatttgaacttctattattatgacaaattggaagcgagaaaaaaacataaggacctgatattttagcattcttaaaagtttatgaactaaatgcttattaacaatatggttgtactaacatgactgaacaattacaatcaaaattatatatgctaaaaattcaattacatgactgaacatttagcaagaccgtgttgacctagtgtcctgattgacaactccaacgaaagattggtgtggttagaatttggtatgggcatatgatttaggcgttctaaatcacatccaccatttgatttagtgcaggtattaccaattacaaacagcatggatacaaattaataacacagtaaaataaactttcacaatgaatcagtatctacggactatggtgcatactcccgatttggtgctagggtgtgagaggacagaaaggagcagtaccagagaagttcaaatcttgtcttcgcaggaggtacggccaccgccgcagccctgctgcctgatccttgccgggacggggaggagacggtgttgaggaggagaacagaaggcagcgacagtgaggaagaggaggatgcggcggcagcggcagcagtggggaaaagagatgggaggcgcctgtggtggggaaggcggtgacttgggagaaaaggtggagcaggcagaggtacggaagccagcgatagccgcttgtgccaagaaagagaagaagaggcggcgctgaccggatgcagcatgaaaagcagcaaacgcaagagcatgcattttttcgcttctttttatataagtttgggatgtggattgtggaaggacttctttgtgaaaagaagattattgaagaattgtgaagatattttgatgattagagaatctaacggctcacatcttttgtattggaaatcggacgactatgcttattcgaatgaagtggcacagtaattttgtgagaaatgactctcctttcacttatttagatataatctaggctgagtggagaaagaataaggaaataatcattcctgcacttctagtatataaacatctttagtttacacttgctagtatacaatcatgcaaccaatacctccttacaatgtcaacctggtgtttcgagagatcacccctgattgccaagttccttacgacaacccgtcatggcgatccgaccggtaatgaatacggaggagttcccatgctagaaaagtctcttaggattatatactaacattgaggaatactcgtactgagctgtcaccatcagcggctcacctctactgacccgcagcatataaccccaattaatggtatctaataatctaagcaccacgcttacattactaaatactacttcatatcgctgcagcagacatagagaaatcattgaaatgaacattaaacccacaccatagcatatctctggtaagctagttacacaattatatcaagacaagtaagaactaaagtcggtactcgaataatatgaattaagtaaaagaccgaaagtatataaaggagaatattttattaacattataagtcttaaaaaagaaggaagagctactagagccatacccgaaatcacatgaagactcgagaactaagagaactactccattcctactccactagcactagaacaataaactaaaattgagagagcttcttgatcttcttcttgagtatgtgttggagtggagtgagctatcctccatctgtaggctgccaatgacggttgtgacggttggaattatccgaaataccctacaaccgtcgttggggagcaatcctagacatccatgtgaaagggggagatcaacggtgcgccgaaccctggcctggcccaatcagcccagaattttgtagccgtgtcgtgtgatgactctttggtctagtagtgtggtggttgggcccatttgatattattttacttgatttgtaatcccatccacccataagtctacctctcgacggagttcaatcgattgttcggttattctccatcgattctcctccaattatgtaaagttctctgcaacgaaataaaattccaattacaagtggagatagattattcttaaacaaaatatgcatgcaagcatagctagttctcctttattttggatatattaacagacgaaatggcttgataccgacagtcaatagccacgtaccagcacatgattcagaaatgcttgcaatcatagcttgggcgcaatgtggaggcctatgtcgatgatgttgtcatcaagatgaaggagaaggataacttaatcgctgacttggaggaaacctttcaaaacatccgggtcttcagaatgaaattaaacccggagaattgctcctttgaagtagcatcagggaagctgtttgatttcatggtgtcacactgtggcatcgaagccatcccagaggaaatgaatggtatgcagaatatgaagccgccaagtacctagaaggacatccaaaaacacaccagatgcctgtcagctcttagtcggtttgtctctaggcttggagaatgaggcatgccctttttcaatggacacctaaagccaaaacctttgaagacttcaagaattttcttatgacaccgcacatgctagcttcaccatatccacaagagcccttgccactttatgtgtcagcaacttcgcatgttgtcagtgcagtgttggatattaaatgagaaggacacatccaaaaggttcagaggcccatttatttcatcagtgatgttttggctggctccaagacacgctatgcataggaccagaagctattacatggagttctgatcacagtccggaagtgggctaagtactttcaaagtcacttggatgccatggttagatcctgttggcacgcgaaattgatccgcgcaacaacacgatactgaccgtgcttacgtgacgatcaccggatgctttccgagcaaagcaacaaagattcctcgctttcgtggaggaaaaccgaccgttttcctgcgcaaaatggcaaagatccaccaaaccctagagcttggcagtagagagaaaaagcacgggaaagagaaaacagaaatagatgaaaatctaaataagtagattgattttgttcgattctttttcttccaatcggccatgcacctgatatatgtacaggcgtgctccggtctttagtagatgtatttagcccacgtatatagaaagtaccaagtagcgatcaattctctaagccgaatacaaaacaaaccaaatcaaacaatgccttatctcagctgacatgcgtgccaccttgtattcccttccgtataagcttcggcgtcaaaacaaccagcctcatctctgcatgatccattggtcttgatatagcccaaacccatgttgttctgtgcatgatccaataggcccactcaactgcagcatacgtatatggaatcatacggcaaaaagacccgcataacgtatatgcacctccatgcagatagacagcacacgcacagccttgtgaagcagaccatcatgcatgaatcttccaagccatcaatctgctgctgctgctctccagataatatagcatcatacctgcacttagaaaacaaaaccaaagtcctaaagaatatattcaaatcatctaactactcattaaaaataatctggccatttgaactacctaatcggccaaattacattattaacacatgcccccctgtttttggtaatatattataaatttcaccaaaaacactataactaatatttttctgaggacgatgtttcaaacaatacaccggccataaccatatcaagctccctgccatacactgggataatactttttcaaatatcttccattcaaagctttaggcaacttatccccctgcaaagactacacaaaatatgaatttccaggaacaatctctacaactttataaggaccttcccagctcggtgaccacttgccaaatttgctactcctagttccaatgggcaaaatcgttttccataccaactcacctatctgaaacgatttttctctcaccttcttattataagccctagctactcttaatttttctttctcaatatgtctcaaggccttcaatctttcctctgggacgtcatctatcctgtccatcattaaattcctataatctacagccgacaaaccattttgtctggctattctaagagcttgtaaattaacctccacagttaacacggcctcctgcccatagactagctcatacggtgttacttgagtcgcaccatgcttagatatccgatgagcccataaagcctctgacaacacctcatgccaccttcttggatgctcctctaccttcttttttataagcttaatcaaaattttgttgctagattcggcctgtccattagcttgagcataataaggcgacaaattcagcaatttaattctaaaagattcgacaaactcactaaattgatgtgacatgaaagaagctccttggtcagtagttaaagcttggggtatgccgaatctatgaataatatgctctaatacaaaattaatcacttctttatgagtcataattttcaaaggaaccgcttccgtccatttagagaaataatcagtagctactaggacgaagcgatgacctttagaagatgaaggatgtatctcaccaacaaaatctaaaccccatcctctaaatggccacggtttaacaatgggatgtagcatagctgcaggtgctaactgaatatttccaaatctttgacatgcctcacagcccttataataacgaaaacaatcatctagcatagtcggccaataaaaacccgctctctttaatagccattgcatcttatgagccgactggtgcgtcccacaaattctttcatgtacctctcccatggctactttagattgatcaggacccaaacactttaaaagtaaaccatctatagttcgacgatacaactcatcatctaacaaagtatattttaaagcttgtcgctgaactttcctatccctcgattgacttgggtctctcaaataattaattaaaggactcctccaatcacctaactcatctcctactgacccggttattccctgttgttggaccgaaccagtcttaccttgtttggtcagatcattaattgtgtctattgttacagtactgattacgcctccaaccgaatcaactccaacagtaacaaacgccggcttttttattacaaaaaacactcccctgttaacatgatagccagacgcctgctgtgctaaaaaatttgctctaacattatcctctctagatatgtgacaaatagtaaaagtgtcaagcgatttaattatatccaaacatcggtccaaataactattcagtagtccatcaagacaattgaattcaccattaacttgctcaactactaaatgtgaatccccaaaagcatcaatatccctcacacccatatctaccaaactttgtaaaccaaacaataaagcctcatactcaacttggttattagtgcaaggatattctaaacggaccgatgtctcataaatcatatcatttggtgaaaacaaaactataccaataccttgcccattcccacaaaccgatccatcaaaataaagtttccatggacacacactaacaaaatcgacatccatatcatctttaaccatatgatcaatgataaaatcagcaaccacttggcctttaatagcacgcaacggctcatataataaatcaaattctattagtgcataagcccacttcccaattctaccactaaggatcggtcgttgcaacatatatttaatcacatcagtttggcaagatactgtacaggtattggaaagcaaataatgacgaaatttggtacatgcataatataaagacaagcacaatttctcaataaacacgtacctgctttcagtgtcaagcaaacgacggctcaaataagccacaacatactccttcccttcatcttcttgcgtcaggaccgcaccgatcaccctttgttgtgcagcaacatataatctgaacggcacaccggacttgggcgcccgaagcactggaggactcaacaaatattgtttaatgttattaaaagcctcccgctgctctgccccccagctaaattcgttttcatgtttcaaccgaagcaaaggaacaaacgattcaatctttccttgctcttctggtcagcccccatgtttgcattaataaatgtaggtctaggaatactcccatcaccaatatcaacctcctccagtggatcagctgatgaaaacccctgaccaagcttctgcacgtcatcgaaatcctcaatagtctcatacatatcgttctttcctgaacgatattgctcagtgcgcttttgcagccacttaatactgtcttctttattcattatatttacaatgataaatcattaagctgagctacattagccggctgtgcatgtacaggtacaaaaccatctctaccaatactaacataatcataatcagacaagtctctacctgtcaaacatcgcatatcgccgtgttgccaatcaaccggcgcttctgtcaaagcaatgcaagctgaattgtccgcttcaattacctccacctcgtcgtcaacccactgaactaaacactgatgtaatgtggagggaatacaacaattcgcatgaatccaatcacgccctaacagaatattgtacctacccttaacatcgacaacaaagaaagcagtaggtattgttttgttcccaacagtgagttccatagaaataacacccttagcctcagataattctccagaaaacccactaagccccatgtttgtcttcattaactcgctttccttttggcccaatttaaaaaagaccgaaagaggtataacattaacaccggcaccaccatcaactaacatgcgaccaataggcttaccatcaatatgtcctttaataaacaaaggcttcaagtgctcacctgatttctcgggcttctcgaaaatcgcattctttggaccaagaacgagctctgcaacctccatttcaggcgctcgaaattcagcaggcaactcaaacaccatgttaatatccatgcaatcactaggcacattctgtttactttcagaaatatcatcaacgtcctcattagcatcagcattgccttcattttcaatgcgtctatccttccatgttttatctatgagcaccattggcctatcccgattaaaccactcatcacgtgccttctcctccttttgttctctgatttctaatgcccgcaacctctgcagccatcgcttttgtgtatgtttaatccctggaggacaccactgtggctgcggtacagtccccggcgccaacctcttgctacggttgccccccgagctgctggcactgcactgattcgccaaagtttcatctccaaaccgctgctgcacgccaactgtttgctgcacagaactgctgctcccaacaccagcatcctcctgttgtcgcttctctcgccaaaaacatgtcggctgctggtttctgccatagtgtgtgctgctgctgctccttcttagccgctgccaagtgcctctactgctacccaaaccatatggttggcacaccactccctgaactgaagatcccggcgacgcaccatctgcaagctgtccctgactactgctgccaactccacgtgtcttcagttcttcaatagcagctgctgctaactccggcttctcaataacaacatcaccaatttttagaggaccagcagctcttgactcatccaaagtggccacagcccggctcacaaccacactactaggaccaacctcaccaccttcatgtgcaactgacgccccggcatcatctctaggtcgaattggcacccacatgcgttgtgaaccactcttgatactattgcttgccatgttattttttggtgaattgcttcttgctggcactgcgagcctcttcctcttagacaaattattatcaccaccgtggattacaatagcatcacttgctctagcttctcggcctctctggttgtataaatgttctccaccaatggccactggtgcattccatccttgctgaaaataagtcactggcacagcaggatatggagcccaaggatcacaaccccatgaaggaaactgaggatacattggaggcggataaccccaatgcattggccccattgcgaaataaggttgctgtacatatgattctccatgccaataaccttgatcaccataactgtgcccaggaggagatctaggacgcttagcacctccaagctgactaaacacgttagtgttcttttgagaagtatatttttctaacaactgtttaaatgtcggcctcggccttggttttagaactggcttcttacccttattaaccttccatactcccacttctggattttttggctttatcatccttgggggcacactatcatgaacaacaacattttttccttcagccgattcggtctgatgtgactgaatgagcatcttcttatttgcaaactctatcacattgacaggaaaaggatcactgtcaagcttcatcttgccaccgtccttgattgtcaaccggccatcattaatcgccgattgtatctgtcaacgaaacacattacaatcattagtagcatgagaaaaagaatgatgccatttacaataagcctttctacccagctcttcggctgacggaatcacatgtccctctgccagtctaatttgtttgcattgcaacagtgtatcaaaaattttatcacatttactaacatcaaaagtatacttcatttctcctcttttagtaggtgcaggtttcagggcagtacacacaaaaggttttgttttagatgtatgcacccattcggctacacatatgtcagtatcttcgtcactagccaaatcctcatcactacaatccaaagtattaaccgcatgtttttctttatctctatttttgccatctttaaaccggctatattgtttaacttctttagcacggttttcctgaatcaaagctttttgtaacacctgattaatacctaaaaactcctggccatctaatttctccttaagatgagcgaacaagcctgaaaaagcaaggtctgctaaatctttttcggctatagttaaactaaaacaacgattctttacatccctgaacctcctaatataatctgaaacagactcactatatttctgcttaaccattgttaaatctgaaagtctaagttcagtctcaccactataaaaataatcgtggaatttctgttctaattgagcccatgtggtgatagaattaggagcaagagatgtaaaccaagtgaaagcagtaccagataatgataaaggaaataatttaactctaaaaacatctgactgtacctcactgctttgtgctaaaaattgtccaacatgctcaaatgtagacctatcatcctccccagtaaatttaacaaattcaggaactctaaaaccccgagggtatgaagttgtatcaaaataatcagggtatggtttttgatatgctcgtgctctgcccttaggttctaaaccaaactccctaagcacactagccatttgatctctgaaatttgcagaaggttgcatcgaattaactggatgtgtaggtgcaacatatgtttgtaacggaactgcatcaacacatgcatcttgtaccggcccacgaggaaccccgatactcgcttgcggcaaaggatgattactgtatgtggattgaaaatatggatgctgtaaattagaattaaaaccaacactacagctgttgctattaagattttgtggacttaacactggaataatagaaatagtagtgctagttgaaacactaggtacagaactaccagccgaaacagcattggaattttggccatctagattgacgtttggaaacaaaggagtttgcagaatgccagccgatgtactggattgaagtactgtatccggcagacaagccgaattaacattatcagaagacaatggctgtttttcgtgatgtccatcaataatttggcgcactatagaacgaatttgacgaggcaaactattctcaaaactttgaaatttatcagacatagattgagcaaattctcgtgacatgtgactcatatctgcaccatatttactagctaccgatatgtcaattaaatgagcaatttcttcggcggaagtaggtttactcacctcaggaattacctttttaatgacgccattccgtgtcttttggtaggcagcgagtagttttttcaactcctcgtcgtgttgccgcagtacctcctgctgttgatcctcagataaatcttcaagcgtgacagcgatgatgttctttgggtcaacagcgcttccatcgctcttttcttcaccagccatgtcgcaccgtgaaacaattgatttcggccaatgaacagggccgaaacttctcgttccccagcggagtcgccaaatatgttggcacgcgaaatagatccgcgcaacaacacgatactgaccgtgcttacgtgacgatcaccggatgctttccgagcaaagcaacaaagattcctcgctttcgtggaggaaaaccgaccgttttcctgcacaaaatggcaaagatccaccaaaccctagagcttggcagtagagagaaaaagcacgggaaagagaaaacaaaaatagatgaaaaactaaataagtagattgattttgttcgattctttttcttccaatcggccatgcacctgatatatatacaggcgtgctccggtctttagcagatgtattcggcccatgtatatagaaagtaccaagtagcgatcaattctctaagccgaatacaaaacaaaccaaatcaaacaatgccttatctcagctgacatgcgtgccaccttgtattcccttccgtataagcttcggcgtcaaaacaaccagcctcatctctgcacgatccattggtcttgatatagtccaaacccatgttgttctgtgcatgatcaaataggcccactcaactgcagcatacatatacggaatcatacggcaaaaagacccgcataacgtatatgcacctccatgcagatatacagcacacgcacagccttgtgaagcagaccatcatgcatgaatcttccaagccatcaatctgctgctgctgctctccagataatatagcatcatacctgcacttagaaaacaaaaccaaactcctaaagaatatattcaaatcatctaactactcattaaaaataatctggccatttgaactacctaatcggccaaattacattattaacaaatcctttctgcttggcaacattcttcacaatcatgaagtcatagggcgtattgcaaagtgggctttggagttgatggcattttacattgccgattcaagacttggacatcaatcaagtcccaagtttctagttgattttgttacctagtggacatagatccaagaaggaacgtctgtggagaagctagagtgttggaccatgtatttttatgggtctaagagagttgctggtattggagcaggggttgtccttatttccctgattagagaatgattgtgatatgttctttatattcattttcgagcgtcatacaatgtggtcgggtacaaagctctacttcacgaattacgccttatcgtgtccttagggatacgacagatgatatttcaaggagatgtgtctagtctcaatcacagcatggctgcttatcgtcaggaggttcgcaagctgtaagacaaatttgatgttttggagttatctcatgtactatgaaataacaatgaagctgctgatcagttggcaaattttgggtacaaaagggagccgctcctacagatgttttcttcgaacaccttcattagccgactgatcagtttggcatagcaatgaagctgctgatttgatggtttggagttatctcatgtactatggcataacaatgaagctgctgattcagtcaaaaaaaaaaacaatgatgctgctgagcagatggcagattttgggtccaaaagagaagctgctccaacagatgttttcgtcgaacaccttcatgagccaattcttgcacagaaggaagtttctaaggaagacacatcaagacaagtctccatgcttgataccgaccggaggatgcctttcatccaatttttaactcatcaggagttgcttcaagaccggaatgaagccaagcggattcatttcacggtcagcactatgttatctcagaaggagagttgtttaatcgcagcccgtatggtgtttttctttggtgagttgcacctgaaaaaggatagcatttattgcaagatatccacacgagtatatttggcagtcatgctgtggctcacacgttcattcgtaaaacatatagatagtgtttgttctggcatacgactatcacagatacggagatcatttggacctgcgagggttgtcattttttgctcgataaattcatgtttctgctgaagtattgcaaaaaaataccactctcatggccttttgctctctgggggctggatatggtgggtcctttcaagggggcttaaggaggattcacacatttgttcgtagccatgaacaagttttctaagtggattgaagccaagcctgttgccacaataagagttgataaagctcgagattttttccttaacattgcgcacctaacatgacaatggcactcagttcacaggaggagtttttaaggatttctacaaagattttggcatcaagatatgtcatgcattagttgcacacccaaagagcaatggtcaagtcgggtgtgccaatagaacgattcttcaaggagataaagctcatgttatagacagattgcgtccttatgctagcaggtgggtggatgaattttcttcattcctttggtccctacggactgcacctagttgggctatcggtcaatctgttctttttggtttatggagctaaagccaagttaccaagtgagatggagtttgaatctcttcaggttcgtagctttgatgaagaacaatgcgatcatgatcatgctgaagaattaaaaaccgactacaagaagctcgtgatattgctattatccagtgccttaaaatgtcttcagcgatttcagtcaaaaaaaaaaaggtcttcagcgatatgataattgtaatgttttatccaaagtatttattgttggtgatatggttctatggaagattcagacaaccaaagatagacacaagttgtgtcccctgtgggaagggccctttatcatttcagaagtgacccacccagggcatattgactataatgtgaagatagttcggctacattcctggaacattgagcacctatgtagcttttacacttaagattatccttatgtaacttattcctctcgactgactgtgtcaaataatttgctttcttgagttgccagtcggggcaccaacggatctaaagggtggtctggttggtcctcggaccactcaaacaattttcagcccaaggcccatgtaagtaggtacggtaaaaaaggatgaagacagaagtcgaagggacgtcatttgattccgcaattccgctccctctcgtgcgatccacaggggatttgtgtgtagcggctagggttagggcttagggccctctctcctttctggtcatctcggctgctccatcctagcatcccttcccagccggcctccgacaatcgagtggcgacgaaaaggcaggcaacaagggtggcaaacgggtgtggtggctggtggtgggctgtgccgatcggtgccggcgggctgatgctatggacagcggcggcgccgtggtagcttgtgggcagccgggcaagctgctttcaaagacaaggttaggtgtatagatgattatattgattagctgattagctcttcacttgatttatttttcttttcaaattgattcttttcctttcaatttcatttgagaaataagatgggtgatgggtttttggtgattatctagtcatgtttttaacatgtgttatctatacttataatatactagcaaaatgcttaagcttcgctatgggcagaaggaaaaaaaatcataatatgtcgtagaactttcttaaattaaatatcacttgtttgcttatttcattatttggtattcacttgtttgaaacaaatgttagactactccactatattagaaaatatcaagggacaatatgtacaaactataaaagcaatgacagattcattgctaccgccactagcggcttttaaaggtgtatagatattggcgttgttattatttgtggtgtttaaaattttttctgtaagtcggaccacccataccataatcctagatatgccactgaatcaagggggggggcgctatatatgaataataatggagtattatgtttcttcaaatgttttttgttttcttcatgtttggcttatcattgatttactttagttgtataatattagaaattataattctttgaccacttaactaggttttaggcttagtacagtccaaagagaaatcttcaacttttaacacacattacagtttaagcaaagccataagttaaactgtcacaatcaagacaagctcatacgcaaatggtctggttacatcagaaatctagcctcagaagttttctaatacatctgtagctatcttccgagcggattcttgagcatcatttatcaactcaaaagcttgttcttctgaacttccatctgcgaagccatccccgactactacaatatccacccggagatataatgactttgtcattgcgagtacttgacttgctcccatgatggctgcttcattgatgttcttgaagtgcttgtctggagcattccttaatttatcgaagatttctgtggcatcttccgaagtgaagcccaagacatttggaatacggcattaagtactagagcagctgcattggctatctcatctcagatagcttcagctctctctactcactgggcaaagacttcaaattgagcttttgacttcaccttgtgggcttatgttcagaagacacaggattcattggatttactctaaagattgatattgcaagcaaaagggcagacatgattaccttccagatcagattcggccttcgttctatctctacttggtaatactttcttttgctttcttcagtcgggcttttagggatttgatctaagacgcttaagctggatagagcattataagttagagcttgcatattgaagttttttcaggaaatgctggaagaatttgtttacctccgattgaaccatgatactccaagtttgtgttttgaagttggccaatcttgtccattagctggcgctcttttgctttcgcggcatcctgggagaccttaagctcttgcttaattgattccagtgtcccaaggtgaggcactagcttctctaatgttttggacttagcttgagatcgccggtatattctcttcatggataaacaacaatatttagtcttcatcaagcaagatagaaatcaaaagaggcataggataacttacattcagtagtttggtgtattcagagagactcttcaccaagaggtcacgttctttagcttctctttgtttattcaaaataattccatgggctctgccttcagaatcacgccattggagctttactatctggttgtttgcaaggaggaccttggatcttttccaattgatcggcgttcggagtggcactaggagcagtttctatcctcagttcttcttacgtttgtgcagcatggtctccagtcgggtgttcttcatccccctttgtttccttagcactcgctatatgattttccattgagggctcctagtgtttggcagctgttcctacttgacttgactggtttctagttgggtgttcttgatcgacagtcgggtcttcagtcatccccgatcggtccttggctagagccttggtgctgggttgtgcagtatcttagcaagtggtttcgaagtctggtgggggagcatcataatgaccagttgggtcaataacctgggtttgttgcaattttgaaaaaaagatacaaagacttgtgcatttcagtcaacaacaatcacagatgtttgtcaatcagattcagacataagctgagtggtgtgatagttaccttcatgatgctctgattttaggcatcgccctctttggttggggcgtcgcttcatgatgttctgattttagcaatcgccctctttggttggggcgtctcttcatgatgttctgatttttggcatcgccctctttggttggggcgtcgcttgggtagtatctccactcgacgcttggtcttcatcttatgtgatgaacttagaaccagttttcttctcttctcagccttcttatttttttgctctgcggctggccttttgcctttttgtcatggcttgattgttgcccccctcccccgacaggctaattgctgccccatttgtggagattagcgtatagccacaggtgggttcgacacaataagtgcattttcctattgatagtgagaagttcacaatcacatgaccattgaattattcaagcaagcaagaaaagtaaatgaggctcagaattacttactgaagatggcggtcggtgaagactatatggtgtgactggaagtttgtgggagtagtcgacaactaaaccttctaaatcctcgagcagatgattttgtagtcaagtgagtcggaacttcggggttgggattcgcctggccttcatacgcaaaagctggtgacaggggttttctttaatcagttgggctttgaggtagaacatactatgaaagaggttgaaacgaggccagattccaagaaaagcttcacaaaagtgaataaagatgccaatgtggaggagggaattagggttcagatgatatatccgatgatctccttcactggcaacacactttcattcaccgtatctttcagatctgtctccttaacgtccgagaccatccaccggttaaaagggatttatctctcttccaccaatggtgagattgggaatggcttggtttagggtttttctctctggatctgaaaggaacgtggagggggaacgctagcacatgaatttggtgaagtttggagtatattggtagtggaatgtgtgtcgaaagtgttgcactaacttcggcggcagtggcagtgaataggagagcgaaagttgagaagatgaagcaacggagacgatgacgcactgtgtcgcagcatttatttaagggcatggatcgcagcccattgagtgcttgcagcccattcttaggtgtggcaggcacatggtctttaggacttgagcatatttgtcttaacaatatgcacgtggataaatacccaatacctttaaaatcctttttttcagcagttatgtaacttttttttatataagttggtacaatgtgattcaaagaggtggcaaacagtgagctttatagattatatattaactttttaaaaaaaatttaaacattgtttagcttatattttgcaatgcagtcggctaaatgccttgtcattgttccttataaaagccacatatgtgtgcgattttttttctaagatcaatatctttagcttattgctatttatgtgatttttcttggtcactattaggcagttggtaaatccactttgagtatattcactcagatttgacaccacgtatgccataattctttcataaaaccactcggctgattgatttatctactctttaaacatagttgactatatgtttagttatattcaactaattacatagtcagagggtacacctaattaggtgtatctagtcgatgcatctaagtatatactctttaatattgtttaaatttttcagccctccacaacctcgttttctggtaaaagcactcgcgagattggcagagatgattgaagcactcggtgtttgattggtttagcttgggagaagattatctttttaactgtaaaggtatgagggggtagctgtggagattatgggtgccatatacccatacgaacagtttatccgactggtgataagaggtgggccatgtctgtatattatgtaaatagactaatctttggaaattacattgccgtgtttctcaatgcatgttccatagttttagtagtatacgattacgtaaatgtataggggaaccgagtagtgtctgaatatgttctcccctttgtagccataccccctatgctatttaagggggcagggagccctctgaggacataaccacaactcgatcattagatcaatacaacacccgacggattcaatccgatccccgaaacagaactggggtattacttctcatcgacaaaacctgaacatgtctaaacatttgtacttttcctaatccacttttcttatttgtcgatttttagaatcgacaatgcctgtttgatcctactgctacatgcgcaggatgatgtacaaaaatcaaccagttgttggtggctgttaaatgccgattctataccgccaacatctgcataaaacatccaacatagtgataggtgcttaatctcacatattccacgagtgttggtttatatttgtatgcaggtgataaaccccgatgttgggaggaaatctagactaaagtgaggagaattatgtatccatacaaggatggattgtaaacttcatcaaaacatcagtgaatcagcccaaaacttcgagaaatggacaaaggagagtctagggagtccgcaagccgaagaccaggccaggagtgtgttggtatttcttaacgacattactaaaaatataattcccagcaatggcgctgaaatacttctagtatattatggtcacagagttcatccgcaagtgcacggatataccattgtagcatttcacccgagagtattccaagggtatcgtatttattttatcccgtgggaagatcatgtacagagaatttgactaataatttatatgttacttgtgataatcatattctaagcaggggttaaggtaattcaagggtagagtgacacacaagcattaactactcattctcatactatattatctaagctaagtggacaaaaaagagaaagataatctattcctatacttcaaatatacatagtatacatacattctaattaactgatatactagctaataccctctatccgatgccctcctggtacttcgagaagccacccctgactgccgagttccttacgacagcccgtcatgaccatacaaaaggggctaaatacggaggaataccctccccaaggaattaacttaggattatataccggcgcggaggaatacccgtactgagctgtcaccatcagcggcccacctctcatccacaatatataaccccaaataatgatatcccgtaatctagacaccacgtctaaactaccagatactaccctaatatcatcgtcatgacataaagtaattgcctatgcaaacattatacccgcaccaaagcatctcccagataagctagccatatattcagtgtaacaagaacataatgtaaagtaggtactcatatactcagaaagtatttcaatactataaatgtatatagaagagtattctaataaaagtacaaagcttacaaaagagaagagaaaagctactagagccatacccgaactcttccgaaggcttccggactcttgatttctactctattcctattccaccagctagatactactaaactaaacttgagagaaatgagagagctattgcttgaggtgtgtgagtgaagtgagaaggtgaagtccttttataggcaggtatgacggttgtaaccgctgcgaaatgtctcaagtaccgcgcaaccgccatcaggagaagatctggagcgtccctgccaaaccccacatccaacggtggagagggaggttcggccgaacgaggggccggcgcatcctggcccaaaatcggtaggtggccttctccgttgcttcaattcgtagacttgtgaattttggcccaattcatcgtgtcaattctgagttcttggcctattcacacataagtgtgattctcgacatcgtccgattgatttatcgtttgagttgatgtcgattctcctccactttattgtcattctctgcaaaaggttagtatacctaatactagtgtaatattattattctaacatatttatgcattgcaagcatcactagttctcctttattctggtaatattgatggtcgaaactgatcgataatgaccgtcgacaaaacaccccaagcttgaacctttgctcgtcccgaggaaaggacgaaaggaaacaaagacttggttgttgaccaggagttgctactatactgcatatctcaaagatacaggtgcaaggtatatgtactctctctcagattaaataatctttggcacggtggcttacccttacccctgattcccacgagacactgcttctccttgctgtgagcggttgaaagacagaacaacaattagagcaccaattacccaatctttattgaactcttattccggaagttttgaaatgatttcacaaaagaaagccaagttccacaaatgattcactctgtctctccaagtgtatcaatttgaattcctcaccaaatgttgcctttttgattcctactctaagggttgatatgtggagctcggcagatatcaatcatggcatacttgcattcacatttattactaaggcaaaaacataaactaaagcagatgactaaacatactcaagatcaagatcgtgaaaaatatgtgtgtggtgtatgatgaaggtggtatatgaggaaaaataaagaaaaatacttctcctttgtgcttactttcttctcccaaaaatccttcttttattgattaggagtgggcatggctacattttttttcaacatcatgctcatgcttgatggagcataactttatttttatttattttttttcataatcatgcctttccctcctctttttttgttcaaaaggacttttctctttagaaaaagaaatcacatgaaagcatggagaatttattttggtggtaaaatgggaatggaatggaatattgcttagctcccagtgtaggagtttagcatgtgcatatatgtgggtgtatgatcttgatcatagagcgtgagaagaatctacacaagtcacaagagtttgacaaagttcaatggaataacaagcaaccaaaatgtatatggtttaatcatgagggcacatttttggctttggtaggaatttatatcaattgaggaactatctattttatcattttgaaaaacaaaacatccggaattcaagtcaaactagtatcaggatcatagcaactcttatttactatctcatatctcgcaacaacttagacttagatcagcaagtgcagctcatttacctcaggttcccggataattgttggctactcatatttagcctttgagagagcacttacctatgaacccatatttaagaaatataaaacagagcaactattcatcatttcaataaagagaactagcttgtcttatctagcatgactcaaaacctatcctatctttttggtattttctattttgcaaatttttatgttgctttcaagttttataagatgcaattggaaagcaaatatgcaattagaaagggaaatatgcaatgtgatacaagttacctcagtggggggagagatgtctcccccccaagcttggctttctctcagggtccttgataaggattgaacccctgaaagcggaagtacgcttgaaggtcatcgtgctgttgctgcatcatgttattgatgttggcgaattgagcattagcaggttgttgccattcttgtgtttgcgctatgtgttccgtgaggttgtaatggatctcccccgtttgcatatcaagggtgtccattctcctagttatttcacccaagtcccaacgagaggaactcgagcgccattcacttggagatggaggcacaccacttgatctggagggttggttgtccccccaacgagaggaactcaagtgccattcacttagagatggaggcacaccacttgatctggagggttggttgtccccccattagatgtcatgaggcgcacgccaccggtcctcactggcacttgcccaggttgagactccgatgctgtggcgtggagcttgggtccatccaggtgcatccccagttggtgcccaacctgcctcatacatctgtatgggtgttgaggatgatgaactctctcgttcgttccttgtcatgttgcgcgtctccctgtatgctccacctgcacgagattcttctatggtctgcaggggaatggttagttcatggcagttgtacaaatgataccctgcatttggcaatgagatttcatttgtacaaccggggaaaaagtaaatcaaagatccatcttctccatgtttcagaatatgcccttgcacaagataagtctcatcaatacatggacgagcggctgagataaagcaatttggtcactaacgacccctagcccttttactatccgagtaatcagagaagtgcactcaataggagtagagaactttatactttctaaccattgccttatcataccttgcgtaggagcaatttttatttttctaaccatggcaaaattgataattaattcatcccccaattggtctcaaatcacctctaggaaagaaagtcatagcaatccatttgtgcatgagcctaagtgtaggattatggatatcattcgctctaggtttcttgcaaattggagcaccagaaatgtcttcccaaaacctatttttctcgaacccagaaattcctttctagagatcgattttataggaatcgtgaaaaccaagaagtgtacttaagcctttccatgtaagtgtgcactccttatggaaaaagtgaaaggaaatttcatcttctatttttttcaaagtgcacagaaattgcaaagtaagcaaacgagaaccatgctcatctaccacagcaaatctctgccaaccaaccgctttccaaatagaacgaaattcaacatccatacctatctttttcagcagctccggagagtattctcgcgtgtgagcatactcccggtcgctcagcatgtcacagtactcctgcggcacgaccttctctagctgaacctccttgtcagccgactcactagatggcacttcttttgatatcccattagctcctgcagggttaggatatggcagagcacgagtggacttacctcccctcatcgtgatcgccttaatattttcaacggaggagttgggttgcctcggaatccttccagtttcatttgcaaggactaaggatgctaactgagctagctgggtttctatcatttttttaaagctcagctgattttgaaaagcagaagcaaagccatctaacttgatccttcaaggagggctggttagaaaagtggcaagcttgtcattggcagcaagctttttgcttagcgcatcattggttttagcttgtgcaaaaacaagatccttcaagtagggctggttagaaaagttaccgttgttgttacctccttgataatatgggcgtggttggttccacccctgatctccttgtggacggtacccgttgttgttgcccatgtacatcgcctcctcatgggattccgggtaatcattcccaaaatgacccgtgccgccacagacttcacacgtgacgtgagagtctaaggccttgacggtttcttgtggccgtttctcgtggtcgtccaatcgcttcatgaggaggtccaacttggcagcaagtaactcaatctccttgatggtatgcatgcctcgctgacgggtctggagtcgttcttcgctccaacccatattggagaccatcttctctattagatcaacggctccttggaccattttaaagaagaaagctcctccagctgccgcgtccaggtgatcgtgggacatcggggtaagtcaattttaaaaattatgcaggatcagccagttgtccatcccatgatgaggacaggcggctacgtagtcctgcagtcgctcccatgctttcggaatagactcgtcccttgtctgctggaaactggaaatccttccacgaagggcgttggttttgcccatcgagaagaatttcgagaagaatgccatagagcatttgtcccagatattgacagcagcatggttggcataaaaccactgcttcgctctcctaaggagggagaacggaaacagccgcagcctgacggcgtcgggactgacgctcttgatagtgtacgtgctacagatctccaggaactattgcagatgagcattggcatcctcattaggcttgccacagaatgagctagcccatttatacaactggctatgaaattcgccccgaactaatcagtatggttagggaaaatcctttttctagctttgatctagaaaatccctaccatcatctgtgagactttgaacaagtctgctcgtgccttaagattcgtggcatgagacaagaaactgtgtggtggaaattgtttacgttctctcttcaagagagagcaaagcaatggtacacctctaccgttggatgtgtgaacggtagttgggaaaagttgcgagacagattttgtcttgccttcttcctagttacttgtattactgcccttcgagtagaaatcctcagttttaagcagatcaaaaacgaatcaatcggtgcagcttagtccagatttacaaatttagtgcagtccggaccaaccctgtccgcacccgagtatgtgctactgcaacatttccatacgggtctggataaggagtctgcattctatctggccataaccgccggaggatcattcatgcacaaaacgccattggaagcaagaataattctggatcgcattctagaaaatgcttccttcatgacgcaatctaatgaaccccagccggaggcatccatgtccaagatagaggaacctctaacgatcgagccacactctgaaccatccacttctgctagctcgattgatgagaagattcctgagcagccatctgtcgagaatgaagaaattcaaactccggatcgtgccgcaactctgttcagggacgattttgacgaagattatggcaacacccttgatgaggtcacaactagctcggatataaccatgactaccatatgtattaatcaaccaaaggtgcatatgttctacattagatttacttgttatatatttgaacaaacattgctacacaatgagtttcgtgtgttgtttgtagaggtacttccttgggcaaaagaaaagagaccgagcgtaaggaatgcatggatgattgaagaagttgattggggaccaaaccaagaccttatccaagccttatttcatctcaccacgtcacttttggtccatagaagacaagagataaagttctacacgttttggattcggattcgggcctcctgacagcatcaacttcaaacggacctagctgctgatctagaaggaattttggggcccatgtgtacttgttggaaagcttatgaagtctactttcagatggttttgctcccatgtccaaattcctaccaagctgccgggaatctgcaaaacaagccacgtatctcatccagtccgaatctgattttgagttttgggccttgtaattgtgtcgtgggctgagcccaatggggtgtgcgccctaaggcaaccctaggacgtccctaatcacatttattcagtatttgtcatcgtttagagttgggttttgcttagattattctgtcaagaacagtttcgccgctagatcggtttgtggaaccccaaattcaagtgcttaatcattcatatgcaatatggttgcaatctatcttgttcttacttgtgttcttcgattcgcatgcagggattagccttctcggtgaggtcaaccgggtttcggcacggttgataaccagaggagacgtggtgctgcgattgcagggctcagtagcgtgttcgttcagaagccggatcgagttgtgtcgtgactccgtccaaatcgactgtttatcaacacctatcagaagatcgggacctaactccctcatcagttggtatcagagcgcggttgcctgttaggtaatttatcttcccataaccagaaaattgccacacaaaaatatttattctttacctagacaatttgagccgttgcattgttctattagattttgctttgttgaattctagattgcatcgtcgtgtcaagtgctggtttagtttttgatttaatttttagttttgagtattgcatttgttcatcacttaggtctaggctcaagtctgtgagttgtaggtcagttttagatccagttttttatctcgtcagttgttgccgggaccttgaaaaattgaatcatctcgtcgtcgggtttctgtttttgtgatttggagaagtttttgtcaagcggttttggaggtactcaaaagctagggttcctgccgtgcttgtgagtagcgtcgtgggtgtgcgcacgtgagagatcggtttgtttttttttcttgggccaccgtacgtttcacataaggcccatagacatctccaccttgaccagccactacacaagccacctctctcttccacttgaccgaggccgttcccaccttccccctccaccgtaccaacctctccacctccgggtaccaggtatcgggagtccatagtttttcatatatcatatatttgttttatcggatctgagaaatttttataaaaacggaacctacatgatgtgaccattccatttttgaggttatctaatttcagttttgtactttacgtttgagtccctgtaatattcatatttacatttgagtccttgttcgaggtcagtggttcaattcttgttgaaaaaaaaataaaaaaaaagaaaaggccgaaaggtgcaaagaaaaagaaagaaaaaaaagccgcacctaaaaaagggaaaaaagacagaaaggtgcttaaaaaaagccgcacaaagaaagaactgcaccaagaaagaaaaaaaaccattcatcctttgagtatgatttcagagtgcggagttatgcattgattcatatatagtccttagtgttgtcgggtgcttgcttgagctagagttgagtctaggctaggccagcacattgactagtactttgaactattattcaactttgcattttcttattagcacaatggcgttcctttgctactatatattgtgcctcccaagctccacatatatacttctggtcagcaccgctttgatccttgcaatcgccacatcacgtccttcaaggtgtcacgaaccagccactggttgtaccgtccttagcattgctggtaagacacttgtaagagcttggtaagatgcttccatttgctagcctccactacaatctatgttctgtagttaataggaacaatattgttctgttgttctctttttttctactgacaatggcaggttacatctcttatggacatgagataaaattggatgggagacaaaccatagctgctacatcaccctccacatatgcacgtgatgatagtactttggtgcaacaagtgctaagttctcaaatggagaaagcggagcaatggcagtaccacgaattatttgaaacaaagtttgtggttaaggatagagcatgtcatactataatcgatagtgagagttgcaataactttgtgagttcagatttggttgagaaacttgagttgcttgcacaaatgcatcctcatccatattacatcaaatggttcaactcttatggtaagttaaaggtaaatagaattgtgagaataaacttttcggttcgaaaattaccatgatactgccaattttgatcgtgttcctatacaagcatgttctttgttgttaggtcaaccatgggtatatgataataatggatcgcataattttgtagttaatacatacacatttagacataatggtcggaaaatgaaattggtacccatgagttttactgaaattttcgaagataatcttgaaaggatgaagaatggaacggaggaaatattcaaagatagtattgaaaggacgaaaaatataatcgatgagattttcagagataccaggaaagatactattatgatgccttcaactaagtctgagttattacaaaatgaacgtaatgttgtgtctattgttttggatactaatattttgcaggcatctgagaataaccaaggtaatgagaaggagaagaaaaacgaaaaggaaaaagacttatctatagctcgatgcatgcttgaagaatgttcaatggaccaagcgccgataatttctgaagatgagaaaaaaggtaatgataatagtgctacagctactcaaggtatgcatatttgtgatgtgccaactatgtccactacttatgttacattagagcaacccatagtggaaacaattgctgaaatacctttatcacaaaacaatttgtttgatatttcttgtgataatgaagagttgtgtgatgcttcacttatatccatgccacaactagtgaatgaacatgttagttctatagtagagccaccatgtgttgagtttaaacatgttattcacattgctagcgagaatgaagagcttaaattgctatcttctttaaatacttggggttatattcaatttgataatttttgtccactcaattgtttagggaagaaattaattgctaaatttgaattgccatgcccttctgatgtgatttttcatattattggcagttatgatagtaaaggagaatatgatgtgcatcgagtatatatttgttcgaatttaactatacctcattttcatgatgaaatgtgttgtctagaaggctgcatgcgtataagtaattctctatctagttcctctggttgtttaaataagttacagattggtttgcaagaaggggagtgtggtggtttttcgacaaccaacatttcaggatccaaccatatggctatcaagaaatgtttctcatcagatgttgtgatacacaatacattctatgacaaggtgaaactgaggacggttccaatcaagaaggggaggatgatgaggtcacaactagctcggatataaccatgactaccttatgtattaatcaaccaaaggtgcatatgttctacattagatttatttattatatatttgaacaaacattgctatacaataagtttcgtgtgtttttgtttgcagaggtacttgcttgggcgaaagaaaagagaccgagcgtaaggaatgcatggatgattgaagaagttgattggggaccaaaccaagaccttctccaagccttctttcatctcaccacgtcacttttggtccatagaagacaagagataaagttctacatgttatggattcggattcgggcctcctgacagcatcaacttcaaacggacctagcagctgatctagaagaaattttggggcccataagaacttgttggaaagattatgaagtctactttcagatggttttggtctcatgtcaaaattccaaccgagctgccgggaatctgcaaaacaagccacgtatctcatccagtccaaatctgattttgagttttgggccttgtaattgtgtcgtgggcttagcccaatggagtgtgcgccctagggcaaccctaggacgtccctaatcacatttatttagtaaccgtcatcgtttagagttgggttttgcttagattattctgtcaagaacactttcgccgctagatcggtttgtggaacctcaaattcgagtgcttaatcattcatatgcaatttggttgcaatctatcttgttcttgcttgtgttcttcgattcgcatgtagggattagccttctcggcgaggtcaaccgggttttggcacggttgataaccagaggagacatggtgctgcgattgcggggctcagtagcttgttcgttcagaagccggatcgagttgtgttgtgactccgcctaaatcgactgtttatcaatacctatcggaagatcgggtcctaactccctcatcaaccctgaactattttagcaagaaaaaaccacacgtccttttgccgcctcccgatcctatggaacttggattcctaagggaaactattcgggtgttaacatccataatgagcgacgaatggctaagggaggtagagctttcatccaaagtaatttaggtaaatactgctccccgaatcattccttgccatttgaaagggaacgacaacgtcggggccaatctcatgtctgagtcttttacattcgcttatctaagtgataaggtagtaaccccgatgaacaaattcttcaaacatccaaacggaaatatcattgaagaatttgggattgtgcaagatgtgcctgtctgctttgaagacagggaggcgatcttggattaccacgtctttgaaattcgagattttgacatcctaatcgggctaccctttgagcaacttctcataaacacaccccgattagacagcctcaaaataactctgggaggaaatgaattttcagttccattttcccggacaaggattgccttgaccgaccctctcccagaaattgagtcagcggacgaggttacagcagttccccctcatgagtctctcgaggcccttctggaagatgaagtctccgacttcatcaaggaagaagcagaccccggtgagactctcgatctgccaatcatggaaccaccacctcaacctccgcttgagcttaaacctctaccttaaggcctacgctatactttcctacacaatgatagagaagctcctatcataatcagtgacaagctctccgaagacgagactcaatgtcttctaacagtgttggaaaagcatcgttctgttgttggctattcccttcatgatctcagagggattaatcacgcactttgcactcctcgtatccctattgaccccgagagtactccctatagggaacctcaacaatggctcaataatacgatgcgagaggttgtaaagaaagaggtcttgaaactcctgcacgccgggattatttatcccgtaccatacagcgagtgggttagcccagttcaggttgtgccaaagaagggaggaatgacggtcgttgcaaatgctcaaaatgaacatatcccgcaacgaaccgtaaccggatggagaatgtgcattgactacaaggctacgaaaaaggatcatttcccgctatccttcattgacgaaatgttggaacagctggcaaatcattccttcttctgtttcctcgctgggtattctaggtatcatcaaattccaatccatccggaggaccaaagtaagactgcgttcacatgtccgtacggcacctatgcatatcgtaggatgtccttcgaactgtgcaacgctcttgcatctttccaaaggtgtatgatgtctattttctcggacatgatcaaggacattatggaagtcttcatggatgactatgtctatggaaagaccttcggtcattgtctgcagaatttagacaaagtcttataacgatgccaagagaaggacctggtacttaattgggaaaagtgacatttcatggtccgtgaatggatagttcttggtcatcgagtgtccgaacgaggaatcgaagttgatccggctaaaatcgatgtaatagatcagtttcctcctcctgtgaacatcaaggggtttcgcggtttcttgggacacgccagcttttatagaaagttcatcaaggacttttctacaatcgcccgacctctgaccgatctactagccaagatgcgccctttgagtttgatgacgcgtgcctaaaatcttttaaaatcctcaaaaaggcactcgtctctgctccaatcaatcaacctcctaattggactattcccttcgagatcatgtgttatgcaaacgatttcactgttggtgcgatcttgggctaaaccatggataaaaagcatcatgcaaactgctatgctagcaaaactctaaccggagctcagctaaattatgcgactactgaaaaagagctgctcgcggttgtttttgctattgataagtttagatcttacttagtgggagctaaagtaatagtctatactgatcatgctgctctgaaatatctgctcactaagaaagatgccaaaccacgtctcttaagatggattttgctgctccaagaatttgacttaaagattaaggataaaaagggagtagaaaattccgtagcagatcatttgtctaggctgcagatcactgacacgcatgaatagccgataaatgacttcttgagagatgatatgctgatgacggttcgcgactccaacccatggtttgccaacatagtgaattacatggtatccaagtacataccaccaggagagaatcaacggaagctgaagtatgaaagtcgctgtcatatatgggatgagccatacttatatcgggtctgctccgatgacttactacgaagatgtgtgccaactgatgaaggacttaagatcatagagtgatgccatgcctcaccctattgtggccattatggtgcattccacacccaggccaagttttggcaaagtggtttcttctggccgacaatgtacgaagactcaaaagaattcgtcagaagatgcacaagctgccagaggcaaggaggaatcactgctcgtgatgcaatgcaccttacatacaatttgcaagtcgagatatttgatgtttggggtatagactttatgggacctttccttaagtcccgtaactgcgagtacatcctggtggcagtcgactatgtctccaagtgggttgaggctatgccgtgcagcgctgcggatgttcacaaaaatcatcttcccaaggtttggtatccctaggatggtcataagtgacggagggtctcacttcattgataaaaccttccgacacctcttacgagagatgggagccaaacacaatgtggccactccttaccatccgcagacctgcggtcaagcagaaatattgaacaaacagatcaagaatattctgcagaagacggtcaacaaaatggcaacaagatggaaggatagattgccggacgcactgtgggcataccggacagcatacaagacaccaattggaatgttccgctatcacatagtctacgggaagtcttgccgactacctgtagaactcgagcacagagcatactgggccatcaggaactggaacatggacttttatggagcaggagaatggagaaaaatgtaaattgctgaacttgaagagtggagagagaaggcttaccacaacgcaaagatatacaaagaaaggacaaagtgctggcatgataaaaggataaaaattaagaaattcaagccaggagacaaagtactaatgttcaactccagggttaagcttttcggccatagaaaattgcgcagtaaatgggaaggaccgttcgacgtcatcgacacctcttcgcacggggcaatcacactccgcaacgactcaggaaatatatttaaggtaaacagtcaatgctgaaaaattttccttgagccaaatgaaactttagatgaagaagtggatgttattgaattaatcgatcatgaaccatgatgatctcatctaatgcatgcttgaaaccctgtaaagttgtcatttttgtgcttagcttaggagttagtgggcctaggagaaaattggaggcctgccggacccaccagggttcggccgaacctcctagttcacccgttcgaccccaattttgaatcgtagtctcccccgctcatttgtagtccgttgtgatgcgctttcggaggtagatcgatcagattaaacttagagcacctgttcttgctcctctcttccacctttgcaagtctcctctcaatctcatctcaaatcccttggttcaccacctccaattcaccaatggctggcaaatctttgatcccattcatcggctcttccttcaactccacatacaacctcgactgagagccgacaccggcgaatcaattgatcccggtgaaacactatacgatggaaggggtaaatgcactgtgggcgcagccccttgcgacagtgcacgggctcccctgcaaatttggagcccatcggcgagctccctggttcggccgaacccccctcggcctagttcggacccccgttcggcagcgcgatccctctcccctcgtcacaaagaccaaaatccggggggattcgcctgcgcggcagccgacaacgggagagctcggtcttttgaaggtgcgacgcctttttcaagatgatcagaaggccgctctgcctcccgccgagcactatgtgggtaccctgttcactgttgacggtcggtatcgatcagtttcgaccgtcaatattaccaaaatagagaagatctagtgatgcttgcaatgcataaatgtattagaataataagcctccactagtattaggcatactaacctcttgcagggaatgacactaaagtggaggagaatcaacatcaactcaaacgataaatcaatcggacgatgtcgagaaccagacttatgtatgaatgggccaagaagaataacggagaaggctgccagccgaatttgggctggattgggccggcccgaggttcggccgaacctcccgcagctttgtttgatccagggttctcctagacggctgagatggctcccaatggcggtaggagggtagtaccgaccattccaactgtcacaactttcattgggaggctataaaaggagctctcatcctcacttcactcacacacctcaatcaatagctttatcatttctttcaactttagtttagtagtatctagctggtggaataggaatagagtagaaatcaggagtccggaagccttcggaagagttcgggtatggctctagcagctttcctttcctcttttgcaagctttgtacttttattagaatactcttctatatacatttatggtattgaaatactttccgagtatatgagtacctactttacattatgttcatgttatactgaatatatggctagcttatcttggagatgcttggtgcgggtataatgtttccatatgcaattactctatgtcatgacgatgatattagagtagtatctggtagtttagacgtgatgtctagattacgaggtatcattatttggggttatatattgcggatgagaggtgggccgctcatggtaaaagctcagtacgggtattcctccgtgccggtatataatcctaagttaatttcttgggaagggtattcctccgtatttagccctagttgtatggtcatgacgggctgtcgtaaggaactcggcagtcaggggtggcttctcgaagtaccaggagggcatcggatagaaggtattagctagtatgtcaattaactagaatgtatgtatactatgtatattagaagtataggaatagattttctttctcttttctttccacctagcttagataatttattatgaggatgagtagtaatgcttgtgtgtcactctacccttggattatcttaacccctgcttagcatatgattatcacaagtaatatataaagtattagtcaagctctctctacatgatcttcccacgagataaaataaatacgatacccttggaatactctcgagtgaaatgctacaatggtatatccgtgcgcttgcggatgaactctgtaaccataatataccaggagtatttctgtgccattgctgggaattatatttctagtaatgtcgttaagaaataccaacattcaccaaggcaggggatgaggtgctccacaagtatgtcacacccaccgctactccatccactccaaaggaggagcggttttgcattatgggagtgcgaactcccagcggtgggtatggcaagggtttgctccggcctttgacagcaacggagaaggagggggcagcagaatctcgtatccctccacctatgaaggtgaagcgtcacttgacgccccctccaattgtaagggcggccgaccaatttcaagaacaagaaatgaagtcgccggagccctcggttcataagctagcatcggaagtgaagaagttccgcaaggagaacattgagctttagggaccgaaatgcggaactaggggtagagcttgctgaacttaggaataattttgatacccttagtcgtggattgtgcgctaagatcaagcgtgcatttatagagatggggaaggagaataagtattatgctaattagatgtctcctttcccataaataaaatggtagtaggtgcttggtttttatttttccaatcatgtaagcacttgatataaataatgtggctcattggtgttaaccccaatggttgccaaagtttgtttttgttttgtttaataaagttcaggttttgaataagtgcgggggagatatcctagcttctaacgtgcatatactctaaaaattgttgaagctctgaacacctggaaggtattgaacactacagaaattacagagggattgggcaccagagtggttcggccgaaccagtgttggccccaattcccctcaatttttactagtaagcaggtaagcacgtctattatctgtatatctccaccatggtatagtactagagcagaaattcagaagacaattggttcaagcataagtaaaagataaaatttccaactaatgaaattcttcatatgattgatcttgtatattcatgattctcagctgaacttgtgcttgtgaacaaccatctatgtttagggacccttatgcatctaagtgattgctttatgtgagatgattcaagatgaaaggaattcttgcaactcttgttatgactattggggatttgttttcaaaataaaattgtgttaaaagctcaatccttcaattgacttcatgctatacctaccaaggccatatgcaagagtatctttgataaatcttattatgcatatgactgcttaacattatattgagctttgtcaaatttatgtgactcatgttagatatatttcatactctcatgatcaaggggtcatttccatatataattaagctaagcttctacactggaagttggcttcccacaaaaattccattcaaataaactcctatattagactatgctttcttctcctagaaaagttcttggcaaaaagaaaatgagaaaaggagggaaatgcatggctatagaaaagagaaaaaaaagaaagaaggaaaataaagcttgctcccaaaatagtgagcaaagttggaaaaatatatatatatatatatatagccatgccccttccatattcctgccaagaaaacaaaatggagagaaggtatggggaaaaggagtgaatcatttctttattccaccattccacaaaatattttactttttcattttctaccacaaataaagacccttgatctaggagtatgactgatgatcttcttgagtccatatttttggctttgcaatatatatgatgtaggtatgtcatgatttatccctaccgagctccacatatcagccttagaataggggtgaattctagtacattttgccttggtgaggattaaaaaaaaagaaaatatatatccttgagagataagagagaaaagtcaatatgaggaaaagagatggtttgcgaaaattcataaaaatcccatgagtctgacaaaaaagcaagaaggactggaatcgagatcgttctatctatcaattactcaagatggtaacatagccactgataaagttcacaggtacaggtatggttgtgaatgatttatatgcctttcagtcaaaataatgatttatatgcctgattcatatcctgaagaaattcattctacactaacctttactcagggacgtgcaaagagctacgtgtggggggttttgttggcggctgttaaatgccgattctataccaccaacatctgcataaagttcagataataaaacatccaacatagtgataggtgcttaacctcacatattccacgagtgttggtttatatttgtatgcaggtgataaaccccaatgttgggagaaaatctagactaaagtggggagaattatgtatccatacaaggatgggttgtgaacttcatcaaaacatcagtgaatcagcccaaaactccgagaaatgcacagaggaaagttcaggaagtccacaggctgaaggccaggccaagagggcctagcccaggtttggccgaaccccctgattcagccgaacccccctgatcaccgttgatcctggggtttggcgtggacgctccagatgctctcctaatgacggttgcggggcagttcggacatttccccttctcacaaacgtcataactgccctataaaaggagcttcactccttcactctcacacacacttctaagcttgagctgaattataagaggctctattgtattatattgtatactagaataggaagagagtagagtagaaaaagttggaagaattatcggtaatctcctcttatttcttttattatgtttattactctgaattcaatataatattcttcctgagtaatttagatttatcttgtgagaattatctcgtggttagttcctaaatagcatacgggattattgttcactataatcaactaaaatatagtgattgctttagtgagttataaacactaaagtagatattgattgcttagacgtggtgtttaggtaattattatccagtaattgctgcgtctcctacagtacgtttgaggtaggtgtagaggtggtgacagccctgaagatcacttaagtcctccctgtccggatacgtggtagagctacatctgggaacagtgggttgccagtgcctgaagtattgtgttaggattaaagttaagctttccctagacactgtttcttactagtaaatcctctctatattgccctatcatctgcttggtgtccttggatgaaccgaaagaagatctggccacacacgttcccttggattcgatatccttgggaatactccgtagttgaagtgctacatcggtatatccgtgcgcttgcggattttatctgtgatcataagaaataccaacaccagtgcaatagaatgttctctcttaaatcagtactgaagttttccttgttcttttggttgtcaattatgctctagacgaactgcaacttgagtctcgttcggtaatatatatattgggatatataagtcgtctcctgattatgatatgttgtttgctgctattgatgtcttgatgaggtgagaggttctgagcaggtacattttctttgcagataccagaacttcatccctgaacaaaagcccagcaggtaaacgtaaaatctccaataccgatttcagggtccaatccctggcacctgattgagccacatggctaaacctgggagtaagattacatatagtaaaatagtgccacgtgtttggagcaccgttccatatcatcgctcatcgctccgcttcctcctactgccaccggcggccgctgcatccttctcctccctatcaccacctcctctccatcccctttagatgccacagccacaccttccaaaccaccgccgccgctgcctccctgtgcaggctacaccagtccctcatcgggtgagatctagggtgccggatccgggcagaacgacgacggctcactacctccgcctactccctgcgagtgccaatgccgcctcctgcccatcaccgccgaagctaaaattagaatgcatatgtggaaaaaaaaatcaacaccaaatctggttggtgttggaacaaatgggctaggcccgatttaattcaattaaattccataggcccacaataaatgttagaggtaataaaaccacctcagaagtttaagtgaagagatctcaacttaaatagggagctagaggagagcccctgttgaccggttgacatagtgagcagactgtcgcgcgagcgcgtgcgccggctggccgggccaaggccatggtgtggccatggccatggcgaggcgggcggctgctctctctctctctctctctctctctctatctctcgtaaatcaccaagtcagagctccgattccgctctccggagatccaggacgagcaggtgcctccggaactgcttcctctgcatctcgatggcttccactggggatggtgcaccaggagctggagggaatggcggtgctccaggcgacaacaccaacggaggcaattctgtcacacaatctagcggagggacattcactgggtataacctttctacactaatgttcatgtgtactaagtttctggttggcgcaatgttttcaatacattgccttgtggtgaatatccatgcttcttatatattaagcatgatttgtttcttacatctgtttgataattgcactggtttattcactgttaaagtcatgattattatcataataatttggattaaaatatgccgaaatgtgacaatatttccaacaatcgaaaaaacttgataggtccttttcggtaattggctttgccatagcactgaatccgcatgcttttgatggttcgaactataagagatggaaagcacgtgcattcctgtggttgacagcgatgcattgcttttatgtttcacggggcaaacgaagtgaaccgcctctctctcctgaggatggtgcacaccttaatgtgatccaagaggctttttataaagtagagatgttggcctacagaacatcttagaagtaacacagctatatgagtccgactgctagtcacagtctatgagatttgggtgatctctagatactcatgaaaaggccaggagtataactcatatgctccaaacaggggggatgcaaacagcagcccagtatcaattaagggtttgagtgaaacctgaatcacacaagactgacaattcaagacatagtccattgttcagttgtgatctggtgtagcttttttcctaggtggaagttcaacttaatagtctccaccgaaacactagtataacaaataggatcataatcaagagcatttcctgtgagtcatgaaatttggtggggattgttagaataaatgggctaggcccgatttaattcaattaaattccataggcccacaataaatgttagtggtaataaaaccacctcaggagtttaagtgaagagatctcaacttaaatagggagctagaggagagcacctgttgacgggttgagatagtgagcggactgcctcgcgcacgccgccggccaggccgggccgaggccgtgggcgaggcgggctggcggctgctgctctctctctcataaattttgcaacggacgggaactgaatctgattcaatgcgggcgcgactattactccggtaacggacgagaagcgctccctcctgcgctataaaacgccaccaccgcgacagagctccggttccgctctacgtctctcgtacttcctcctccggtcgctgaacctcttatgtttcctgcgctgctactcggtgttccgcggttctggtctcttgcgcgcacgggagatccgggacgagcaggtgcctccggaactccgtccgcctgagaacctacatgggtaggcgggtgatcaagtttttggggagcgtctcgacgcaactactatgcttcctctgcatctcaatggcttcctctggggatggtgcaccaggagctggagggaacggcggcgctccaggcgacaacaccaacggagccaattctgcctcacaatgcagcggagggacattcactgggtataacctttctgcactactattcatgtttactaagtttctggttggcgcaatgttttcaatacattgccttgtggtgaatatccatgcttcgtatatattaaggatgatttgtttgttacatctgtttgataattgcattggtttattccctgttaaagtcatgattattatcacaataatttggattaaaatatgccgtaatgtgaccatatttccaacatttggttgaaagcccctactctttcccatgttagatctggcactgacaggcatagaagtgcaggtgttaatggttcgcatgccatcgcacgtggaaagagagtgtcgaaacatgaattcggcaataataaaaggggatagcacacaagagctaaaagtggatggatgcggagacaaggatttagacaggttcaggccctctcgatgagaggtaataccctactcctgtttggggatttgaatccaccgggtgtattatagatctgacgatctagttgtctcatgccccctagagggcctcctgcccacattatataggatgaggggcaggattacaagatagaaaccttaaccaatacggtatcggtttcctaaatctattttacaatattattaaatcaggactttaggccgctaaataatataaaaggaaacgtaatacctaagtcatgatctgttacatattccatagatataagctatcccctacgactagtcggataaccatgccgtgtgggtatggggtacccataatctccacagtagcccctaagaccttcacagtcaaaaagataatcttctctcgaactaggttactccaaagccgagtgcttcaatcatgtttgccatggtctcccgagtacttttaccaaatctgaagactgtggagggctgaaaaataaagtcaggtgcatctagtcgatgcacctaataggtgtagcccccgactatgtggttaattgaacaaaccaagcatatagtcaagaaataaataatccaaccaaccaagtggtttcgataattgtagtcaaccaaacgacttgatattaatatgtagcatatgcggtgtgaatccccgaataacataatccaagtgatataccgactgctttgtaaaacatgatgtgtacaatctaaagttgattacatcattgaaaattcacatagcaaaaatagctataaagaaccttgtatactatgaataaagaattttccaatgcattgggcatacgccatgcacacactgctttaagagatgtgcttaagtccctaaaagacacatggtttcaccacacctggaaatatatggcatatgtggtgtaaagtgcacacttacgtggcaaaaagcaaccgcctggaaaatgaccaagatatataatcagcctaagccctaatattggtcaataaaagtgcacactaacgtggcaaaaagcaatgatatcgtatccaattaattgctttattaacacaaacagcgccttgactatataaaaaagttagcggggcagctatgaaaaacttcactgttgggcaccttttaagatgcattgtaccaactcctaaaaagttgagtaactgcggtataaaagaattttaaggtattgggcacttgatcacgcgcactttggcctaagaaaaaagtgcctaagtccctaaaagaacgtgataggccacacctgaaaatatgggctgcagacatattaggcctaggccaaaaaatatgccttcgacaccctttaaaggatgacgcatgtaacatgctcccgagtaataaatcttccgggtgatatagaccaagtatagctcatatgaatagcttctgatctgagtgattatcccttatgggatactccaaaatagatataaaaattgaatcccgactggcgcaagtattcggttgataacccttacaggaaataataaataatccagtctttgagcatagaaaatagacccatgatcatgaattcatgttgaatgtatccggaacaagtccaaattgaaggtatgatacttgtgtttgagctaataagcccctgagcatatagcttgtccttctgtcgtaatcataattgtccattgatggtagctgacgcagctggcatagagataagacgaccaatatagagataatattgcccaccagaggtggcaaaaatattggtggtactgaagatagtgataccaatcaaaagttacgaagttgcatagccgtggaggcgaagaaaccagccggcagcagtcaggtcagccagcaatgaatatgaaggcgcccaacaataatgttgtgtagccatggcagtgaaataatcagtcggtgacagacgaggcagcggaggcgaagacgtagtcctccattagcaacggcagagatgtcagggccgatgaagtagaggtgctggtgatgaagttagtgacaataatccatcaaactgttgagaagatatcaaagctcaagtaattttcttgatgtgtgcataacggtgattgatgcaacaccccttgatttgtaaagatggtagtagaacttggagttgtactgttgcagatgcttcacttgaaggaaagtaaatgttgttgtcctactcatcgaaactgagctgattggttgataactctaaactcccggacatgttgattaaatctcaaacttcatatttgagaaatttggagtagattgtggcggcgtgaagaagccaaaattgacggtgaaataattgaagttgctgaaatagaatgcctgctctgaagcaaagacgaagataatgactcttggagtagattccgtagaactctttggctgattagttgattgcttcgtcttgacataaagcttgtcgaattttgaaagtcttgtatttgtgtagcccccgactctttggttagttgggaaacaactgaacatagagtcgagaactgtagtttcttgtcgtcgagtagtcattgcttgagtgaaaatgtatgttgaagatgtccgagtagaaatattgaagattggaacaccacttgttgtaataatataacacggcatcatagttgataatgcatgccgagatgtcgaagcttctgtagatgtcatggctggtgaagtagcaaaacttgcgaagtagcagcaattgagtttgccggtgccgaagataataaagatgaagtcgctccaccatggtgacaaagttgcaaagccgtgatgaagtgaacacgagtcagcggcaacagaagaaaaccggtggcgaagacgtgtagttgtgaagataaatactctagtcggcggcggcataaccagtcggcgacggaagacgatgatgtccatcagtggtggtagcggtataaaccagacgtagaggcgagggcattagtcagcaacagacgagacgactggcgatgaagacgataaggccaatcaacactggcagaatcatgcagccataggagtgaagaaaccagtcggcagcagacgtagacagcttgcgttgaaggtgatgacgcctatttgcggtggtggcgatgtggccagccatgaaaacgatagtactagttggacggtcgtgaagacatagatgcccaataacggtggcataataggccagccgtgcaggcggaaacatcagtctgcggcggcgaaggcaagctggcagtgaaaacgttgacgctcatcaacggcggcataatagaccagccgtgtaggcggagacaccagtcggcggcagacgaggcgactggtcggtaaagacgtagacgcccatcaacggtggcataataggccagtcgtgcaggcggaaacaccattcggtggcgacggaggcaagctggtggtgaagacgtagatgcctaacaacggtggtgtaaccaaccaaccgtatgggcgaagacactagtcggcggcggacgacgaagccggtcgatgaagacaacgacgcccaacaacggcggtgtgtcaacccaaccgtataggcgaggacaccagtcagcggcgacgacggcaagccggtggtgatgttctgactgatccattcctgtagcgtaagagataagcttaaagccatgaatctcttttatgcatatctggatctagatcctgcagaacaaacatataggatgagtagtatctgatgtaaatataatactcgaggaaaattcaagtattttaaaatgtttataaatatatatttctcctcttgtcaattttgatttccccgagcggatgactccttacgtttaaacactctgcccgactagtcatagcccccaagcaccaggagtcggcctaggcacttcccaaacatgcatacgagtgacatgagttcgtcattaatggaacaaagtttcatggatcagagtttactactcgggtatttttgcaattgttacaagcagaaaataaattatcttatctctatgcttttgttttcttccgagtaatacttagcaccttgcgttactcggtccatccaacgagcccccgggtgctaggaattggcccaaaggcaactatccattgacaaaccaaacggaaagcataggaagatagaactccataactcgataggcacttttatactcagattatgtcgtaagcaatcaagataaatattataaaaattgtttaaaaaatatgatataacatctgtagcccccgactcactagtcaacggtggaccagttgatgtagtgaggcagaggaaaaggaaaatatcatataatggagaaaataaatgatgacatatctttttaatgttctcctcggtggcggctgaggtggccggtgtgggaacaaagccgtccatcattggcaatgaaaacaccagccaaaaaagcagcttgaggcgactgacgatgatagtgaagacacccatcaacggcggcataataggccaaccgtataggcagaaacaccagtcggcggcaacgaaggcgagctagcggtgaagatgtagacgcccatcaacggtggcataataggtcagccgtgcaggcggaaacaccagtcgacggcggcgaaggcaggccagcggtgaagtcgtagacacccaacaacgcggcataataggccagccgtgcaggcggacaccagtcgacggcggcgaaggccagccggtcggtgaagacgtggacgcccataaatggtggtgtgaccaaccaaccgtataggcgagcacaccaatcggcggcgacggaggcaggctggcagtgaagttgtagacgcccaacagcggcggcataataggccagctgtgcaggcggaaacaccagtcggcagcggcgaaggccagccggtcggtgaagacgtagacgaccataaacggtggtgtgaccaaccagccatataggcgaggacaccagtcggcggcgacgaaggccggccggcggtgaagtcgtagacgcccaacagcggcggcataataggccagccgtgcaggcggaaacaccagtcggcggcggcgaaggccagccggtcggtgaaaacgtggacgcccataaatggtggtgtgaccaaccaaccatataggcgaggacaccagtcggcggcgacggaggcaggccggtggtgaagtcgtagacgcccaacagtggcggcataatagttcagccgtataggcggaaacaccagccggcggcggcgatggccagccggtcggtgaagacgtagatgcccaacaacggtggtgtgaacaaccaaatgtgtaggcgagggcaccagtcggcggcgacgaaggcaggccgacggtgatgatgtagacacccaacaatggtggtgtgaccaaccaaccgtgtagatgagggcaccagttggcggcgacggaggcagccgacacgggtacatgcaaaatagatcaatcaacagatgaatttgtttagtaccacaaatatgaatatacatgcatgccataaacgtgcatattttcatgtaaatgtgactttctctgatctggttggtcagatgggctctcatagagacgtggtggcaataaggaaaaaacacgccgacacccgtacatgcaaccaaaaaatcagaaaagttaaatatgtgccagtaattaatcaaaatagagaattgctggagaaccgggaactggcagtacggccaaagcccatctccgtccgacacgtttccagccagttcctcatgcgagctttcgtgctggcaggcgaggccgtgaccctcactctgaattagactcggattcacaccgagtgaatggagcgctttgtctcgcgtagcggcggcttaccaatgcccaatggaaccccttggtcgccagcagtacgtgcagacaggaaaaagaagaaaaatagcaacatcaatatgtgattggaaatcaatctaataaacaacgttaagccgaaagaggaaactcagcgacgtcgaagattcaattcatcgaactcgtcgaaattgatctcccggtagattgaatctgataaagagaggaaaggcttgtcggagcccttggtgagaaagtcgaggcttccaacaattcctgagattgattccatcacactttttgacgggtaactcgacgcatcccctacctggcgcgccaactgtcgaaacatgaattcggcaataataaaaggggatagcgcacgagacctaaaagtggatggatgcggagacaagtatttagacaggttcagagcctctcgatgagaggtaataccctactcctgtttggggatttgaatccaccgggtgtattatagatctgacgatctagttgtctcataccctctagagggcctcctgcccaccttatataggatgaggggcaggattacaagatagaaaccttaaccaatacggtatcggttttctaaatctattttataatattatcaaatcaggactttaggccactccataatataaaagtaaacgtaatacccaagtcatgatctgttacatattccatagatataagctatcccttacgactagtcggataaccatgccgtgtgggtatggggtgcccataatctccatagagagcggcagcacgcgagaaaaagggagatgtccatggtgacggctccccatctccaacaggtctctgtgctctattactggagcctctcgccctgagctcgaattccctaccgccatagcagccgcaaggcgagtgtcaggcaaagcatgttggaggcagtggctgggagaactggctgtgaacgatactagagcagttcaggaggacagaggacatgcggagagagtaaaccaggagatcacatattaaaccgttggatgcaactcacatgaatcatggccacaatggacggtagagatgtcactatgacaaacacaaccgctactactagtacgagacatggcaaaggtattaaataaagatcttgctttttctttttgcaaattaagtgcatttgataaacaaacatatataaccagaataacatgtactatatattgtttttcaatggtaattcataaaatataagaatgccacatgaacatttaaaagggctaattggataggtgccattataaatttgccatttttaaaatactagctagctcctccaaccgaaagtcttacccatatttctttttctttttccaaattcgataagcatatttgtagtctccatgcatttaaggcttaaggggctgtttggttgatggccataagttgctaattttttgtcacacttgtagttagacaagtttgaccatgttaagtgagtgtttggttggctcccacatgtgtggtatgatttctcttttataatctaagtctcacatgttagtgactctgaaaagtgtaacacggtgtcattttattggctagagttggcttggattttgatggcctcacatttagcaattttggtaaagaaaacatggcaaacctcggcaatcctagtatgtgaaccaaacaacccctaaatgaagatattgttttttcatgttgtagagctattgttgattcgaacccgagctaccatcttaatattcatttgttatctgcaggatgagttaattgttttctttttcttggtgaaaaagtaatatgccttcaataccgtgagggaaaggtgaaaataacctgtgagccagaagccaatacgccattgcaaaagggcagcggtttcggaagatcgggcgatgagggcgaattgtcagtcacggatccagtgatggcagagatgacaggatgtagatcatgcggtgacgagcagcaagagcatggatctggtgatgaccagcacaagaagcatgcaccgacggtggctggagtgattgttgggcaacatctcaccataacatgatggaggcagagggggggaggtacatcatcaatattcaacttctcttctccttacctcaaggtgctcaccaatgacataatttcgcagccatttagcattcgaggtcaccgaactcgatagtgttggtgatgatgatgaggatgatgctgccgacatccagcaaaactcattcgcgttgtgctcgtcattcagcaatgtgaagcgctcccgcatcacaaactttatcttcggcggtggggacgatgccgatgttggtgatggcacagagaagagagagggaggaggttgaaggaagacggggcatgtgtaatacaagtaaaatacatagattaacggtatgttttgaactatatgcaaattgtaatggcactgacccgaatatatgaattctaatggcgtaaagaaaagaaatgttagttatctaataaaaacattttttgtttatcatacaaagtcatcatttttttaaaaaaaaaatatcatcaactatattatcttatatttgttacacggtaaaattactcacatttcaatatatacagataaatgagaaaatattaagatttctgccttttccaatatacattggatttcaatatagtaggatattgccattgtttaaataaatattatttgttgcagttgctgcaaataaataaaagaaaacttaaatcattgtttgttttatcatgcacacgcaggggctagctactgggagagccaaatggcgcgccaattttctagttatagccgtaaaccaaagggaacacgtactagtagtgtaagacctcttctgaataattattatgaccatcatacgcctacaacttgttcccctcttaacaaattcgggtctgtttttttattgcccaaataaatcatgataaatttggtaatgctaaatttctacgcattttgtttgcatagtggagtaaagacaatagaactaactatgcttttgcctgcaaaaggaaaatgatatttatactactatttagaagaatgataaaaatctggtccaggtggggttggccgaggcccaacaaattaaggttgtccggaccccaacagttcttaggcacatcctctcgggaaaaggtccaatctccctaaaagactagtccaataggggtagggtggttctcccttttaaggtgggttccttctcccaagctaagcaaggtagtattattcagaggctcacacggtcgccgctcgacttttgcgtttttgccagcgggtaatagtcgacttttgcgtctttgcgtatttgccagcgggtagaggatgtcctcattattcccacccccttaacaagggcccagctctgataccaaatgataacacccccttaacaagggcccagctctgataccaaatgataacaatccggcccaggtgaggttgaccgaggcctaacaaattaaggttgcctggaacccaacagttcttaggcacacctacttgaggaaagggtggctctcccttttaaggtggattctttctcccaagctaagcaaggtgggattattcagaggcacacacggtcgccgtctgacttttgcgtctttaccagcgggtaatagtggaggatgtcctcatcaaagaagctttgattaaaattttaaaactttagtaaccagttttgttgtcgaataattttataaaatttaataatctaaaacattatgacattatttttaaggcaaatctatacatggctttttttactgggtatttcagaaattttggctaaattttgttctaaacgtcaattattagattgagtttttgttttcatgtatcatacactactacataattattttttgtaagctggcattttaggttttcccatgcgggtgctccacccgcccggagccaggtgcccgtaaaaatgaagattttcacgcgcaagcaccgcaaatagtttgtgaaaattgcttttcgcaaatgggcatgttaagccacccgtcagcactagaattttgaaaaacaaaaaaaaatcccaaaaatctacgaaaccctagccacgatcccatcacaactccagggtcgaggagccgaggccgccggtggtggaggacaaggagcccaggcacccgtccgtcgccgctggcaactctcgcttgttgcagcgcgctaccacaagatccgatcgtcacggtgcggccaccatcggattgaccattgtgaggttgctggccatggagtagtcaaggtgcgcatgttagtggaggtggaatagcagagggcgctgccgagcaccccgtcacggattctgccatcgccaagttcccaatgctgactcccgagcctgctaccgaccgcccccgagcccatcgctctcgatccagccagtcgccggtcgctcgttcaccaatgccgctcggtgagacagagagagagagagatgtgcactagggttcccgatcttctgaaaggttctgataaacaatgatttgggcggagtcgcgacacaaatcgatctggcttcttgaacgtgcacgctcttaagccctgcaatcgcagcaccatgtctcctctggttatcacctgtgtcaaaacgcggatgaccaccgcgagaaggctaatccctgtttgccaatcgaagaacacaaacaagaacaagatagaatacaaccaaaattgcagatgaatgattaagctcacaggttggggtcttacaaaccgatatagcggcgaaactattctcgacagactaatataagcaaaacccaaaccttaaagatgatggtggctgctgatatatagattttagggtcgtgcgaccccctctcgacacaaccgtaatgggttccaacgtgttacacggccttacacggcccaaaggcccaaatacggtgatgcagcaccgggacagattctagacgtcaaattggtcggtcgattcccgttgaatcggaaagaatttggatgtgggaccaaaaccattagaaaggttatcttcttagctttccatccatataaaaaacgctcacatccgagcacgtatgcgacctgggcgcccgttttagtgcagactggtcctgggctccgaattgcacttgaagtcaacttggagaaggtcttgatttggtccccaatcaacttcttggatattccatgcattcgctatgctcggtctcttttccttcgtccaagcaagtacctatgcaaacgaaaacacgtaaaactaattttgcagcaaagtttgttcaaatatataacaagtaaatctaatgtagaacatatgcacctttgtttgattaatacataatgtagccatggttatatcggagctagttttgtccacattagagagagagagagatagagagagtttgagagaggaaggagaggataagagaggagaggtggaggagcggaggagataagggatagggaggtgcggggaggagataagtatgcatttggatattatagtttgtagtcactttcgcaagcgggcctccccataaggtacctactgaggaacttgggccccgatcttccgataggtattgataaatctcgatttagtgaaaacttgatacacacgatctattttccgagcaacatgatccaaagcctgcaattgcagcaacacgatacttctcctctgtggttatcagctatacgttgctcagttgacctcaccgagaagactaatccccgcatgcgaatcaaagatcacaagcaagaacaaggtatatcataactcaattgcagatgaatgattcagaaccaggcgttccacaaaccaaactagcagcgaaactgtaatgtcagaaataatctaagcaaaatctgactctaaacactacaactaaaacatcaagtagagacacttttgtagacgcaatttttgaaatgtctttaaaatcagaagttccaaagtgtagagacactttttagaagcactttaaatattgcctaaaacaattttaaccttgagacactttcatcccaacttgttaaatttatcttgtagaggcacttttttggcactttaaaatttgcctaatatgtaaaggtgttttcttgagacattttaatctctatagaggtacttataggaattttaatctattctaactaactagataaaagtaacatgggggcacatatatgtacaaataaataacatgaggttgagatggttagatcattcaagttaaaaaaaacatatgtattcaagaggtctagacttcaagaattggtaattgcatgggaagtgatgattttttcccttttttactttggtttgtactattgtggaagattttaatgccttcagaaaatgtctatactctcttatagaggtaaaaacatgtctctatgaaaatgacagaaggcacatagacattttgtaaagtgccatttcatttatagagacaattcactacaagacatttatgagacatttttgaaaatgactctagagtattgtagacacatttaaaaagtgactctataggattagagaagtgtatctacatggtattttgttgtagtgaaactatgacgtcgtagggttagccctagggtgccagcctcttgggcttaatctatgacataattacaagacccaagactcaaatttgactcggactgaatgaactatgtggcttgttttacatatgaaaaaaaatacaaaactcatggtgcatttgtaaaggcccaaatcccgacggcttgatagaaatttttgacgtcggaccaaaatcatataaaagtagactccataagctttccaacaagtactcacgggccccgagattccttctaaattagcaactaagttcgtttgaagttgatgttgttaggagacccgaatccaaatccaaaatgtgtgaaacttcatctcttgccttctatggatcaaaattgacatggtgatctgggagtagacttggtgaaggttttagtttggtctcaatcatttttttttatcatccaagcactttgtgagcccgaactcctttctttcaccacgcaagtttttctacacttgaaaatatacaaaactcatggagcatttgttgaaaaatatagtaagtaaacctaatatataacatatgcatctttagtttgatgatgtgcaatataagatggttttatccgagctaatattttcctcatcagtacctacgaaaatcaaatgcttacatatgccttctgaagaggcccgcttatgaaaatatctttacttttatatacaatcgtcataagataaccgcttatgattttcgcaagcgggcctcgaccgacctcaggaatctgaatattgaatgtggacgcaattacgacctgtctgaagcatgcagcggtctcataaaaaatccattttatagcagtgatatagaaagaataaagattgttcaacacgattttatccattaaactccatcttgtttgcccctcacaacacaaatatcaaaagagagctctgggtcaacatcgctgatccagagtgcgatgtacttgaacgaaacccgtaaaaatacaagtccaaatgggcatgtgaacgatgctgcaaatccaactgcccgtgaggggaatcatatgacacactcccgctccggcattcaaaacatagaagagagattccaaacaaattaattaggaatcgttctaacgtagggcttttccttcttctgaaaaaggaaaataaaaggcagagaatgaacactaccagactccaggcctagcctgtaggagcaaaaccgtcagaaaaatagctttaaccgtcagaaattatattcctgtcggttcaccgtcagaaattgccgacagaaaaatcaccacagagaaattcaattttcctgtcgggttacctacaggaaaacaatttctgtgggtatttccctgggggtggaacacaggaaaatgtattggcgtcaggtttttcacctgtaaattctgacgcggaaccgacaggaaaataccgtcacaatatttttctttgtgagtgaaccgacaggaaaataccgtcgcagttgtttttttttttttggctagaattatattatttctgtcggttggttataataaaaccgtcagaataattggagcatattgaaaaaaaaacagctaataaaagctgctaaaaagatctgatttcatttcacttacataatagaatgcatccaaacaatgaattcacaacagcttcacaaataacatgcccagaaatcacaaaatcattcaaataatgccaaatcacagctgactcaaatagccatcatctcagccaccaattgattcaaatagccaccatttcatatacttgcatcaccatacatgcagtacatcaagttctagtactgattctataggagtaatcaggtttacaaccaataggtgtccccatatcaccttgacatgctaactgacattgcacaactacttagccattacttacaaccaatacacttgtgagccattacttaagtgttcagaagagcatgtgtaatctgactttgttgctaccaaaagagcataaactatgttaagtctcatctagtttagtcaccaccaaacaggccatgaagtattaccgaagtctctatctactaagttgctaccaaaataatatatgggctaagtactgatgtgcgaaacaaaagacatgtccacgtcaccgatgcattgtgcaaatgcaagaagctaggctgcgatagcccgtccactgctgcaaacttgatttctgttgcatccattgttcgcctcgcagccgatgttcacctcacagaccacgttctcctcactgcccatgttggtgtcagtggttccatcattctcagcttcctgctgtgagcccgcatgagaagaaccagttcgctgcaataaataggtccgaacattaagtctgcactgcagtgatgccaaagttctgatgaaagaagtatctatccaatgaacatgcatataccttataaagaaaaaaacatctatggctagctagactttccactgaagtaatagcaaacattgaaatgaaataatgccagaaatcgcatgcctgactttggatgacatgaccagaaacagttgtggcaaaccattatttccaatgctagcagaaatcagtatactacaacactaatggttgtggcagcaataaaacaattacacttaaatccttaatatcccatcgcagacaccatatatccaaacttcatgtaaaacaagatcgaatccagctagaatagcaaaaagttactagaatcaagctctctatgtcacaagcttcagacatctatatttccaaacctctaataggggtgacattcctggctaccttaccataatttagaactaagaatgaggttatgcccaggtgttacagttctcaacatgaggcttgtgaactgctgcacgtgttgttgacattctgctaccaaaaacgattagttctcttaacgaaataaaagaaaaaaaagggtaccatggttgcttaggttggatttttttaatatactgagacaaatgagtgttatttctttcattacacaacttacctggacatgcgcaggagacattagatcttcattagcaggtggcactacatcttcctcagatggtggttccactcctgtcttttcataaagaaactaaaatgggacagggattagacaaggctagaatgcagaatcacatattattgtacagttataatagaagggttaccctgatcagccgttcattggaatccattcggcggcgatgttctgcattttcgcgtgtgagttttaaattttcgtttcgcaaagtttgattggctgatggggtagatggcctaggtgctgtctctttaccggccgctataacagtagacttggacacagcaccattgcctatgggaaggcgtccatgtggcagtccattgcaaatggaataaagtgcctttggatctaattcatggccatctgaatctccttgagttcctgagctagtcactgcagtatagtcagcctacaagaacaatagccttttctaagtttgtgcagcaatgatggagataaagtagctagagaaagaaaatatagacatagttaggaaagatcactgtgtttataccatgattttttctgccttttggttgtcgatccgtccatgagttccagtactgtccacgttttttgcacctgatttcataacaccaaatgtgtttagtccagtagccttctcaggtccaaagtcatgtgcctacaaatgcagccaataatgtgttacacaaccaaagctcaaataggaaataatacacaagaaatgatgttacttgatcagattttctaccagccactgttgtgtctcagtaaatggccttgatcctcctctattccgagaatcgtcttcagattgtagccttgaatcttgggcttttttccgcttctcaaggtattgctcagtgtcccagtggtggcagagagaaggccaatctgattcactaacccattccacacgagccagcaggtattcctcgtctgagagttcaattgtacgggctacttcgtctttaatcttttccccacgcactttaaagaagtagagcttgacagcatcgacacgaagttgatacatcatatcattgacgcgcttgtttgcatattgttgtaagacacggttagcctctgcctttaattcttctcttgtagaaaacaatcgctgcatgatgtgttacaggtatacaaatagatttaaaaaaacaaaaccaaacacttctttgaaatctaggataggaaagaattacggttacccaaaattcattcaccactcgctctgcacatgtctctccatattcttcattttctttcaaataataatctgcccaatggagtgcagggcggctacgaataattctaccatcattgtcaaggtccttcacagtgcctgggtattcgcgtttcagaataaccccaagctgtgaggtatacttgtactctgcagcatgacaattcacatacttgaattgcctgtatacaaggttagcacacttagtctcaattcacataattggttcaaatgaactagtagcaaatgactaaattagtatagcagttctgaatttttcttgcatcgcttaaaaaatttatgaatgtatacttacatttcacccctaggtataaggcccaccttccgacccggtcgaggtacagccaggctggtccttgacctctcctttcgtcctctttgtctagcttgctgttcagcttgctcagtaattgcacgatgacttccttgactctgaccttcagcattagagttagcagggttcacttgagtgccatttgtagaaggcacactccttgagctagcaccattagcactgcttgtattggaaagttggctagctgggcgcttctttgaagcaagagaccgatggcgaaggttgttcatgatctgcacatgcacatacagctaattaaataacttactagtataattaaatacataaactaaatgctattaagacaatattacatcagatatagcatatttcagtaacacaaagataccaacatccagcttatcttagtcaagtcttgtccacaacatataagaacacactgaccacaagttcacaacataagcaaggaaaaaaaatacaagacataaaacacaatcagaaatcctcaggatcataaatgatggcttcaggttcagcttcttcttcatcttcttcatcatcttcctcatcatccagctcttcatctccttgtgttggagagttacatttggcaagatagtccaaatctttctcattagttatctcatcagatatgtaagtggttgctatttcaatgtcatcccctaaatcaataacaaaatgaccttccaatccttcttcttgatagaatgtgtcaatttgtggctgatcattaggaggagcagactcattcgtggtactaggaggaagccaaccatgaggggtaacattatgtacaacccaccaatcttttaaatctggtctggaatcacatgggtaaggcaagtaataaacttgagtaacttgacttgccagcacaaatggttcaaagtttgaaagcctagatgtgtggttaacttcaaccaatcccaaattttcagttcgcctaacaccagaatttgttggatctaaccagcggcaatcaaataaaaccaactctaggttcatgctgccctcccaagtaattttgatgatgtcctcgatgacaccaaagtagtcaataacattgttatcatcgtcaacgcaagacacacaaacaccagtattgacagtacttaatcctgattttgcactctcatacttctctgaacgaaatctatatccattcacatcatagcatccataagtggttattcttctaggaaaaccataagaaatttgctgcaaggtgctatcaatactagaatttgccatgcactgcataaatgaaagttactagtttagaatatttcaaataaagggaaggagaggaagttaaaaagtaggcagaattacttgtttcttgaaccagtcaaagaaatttggcccatgtttagttccacggtaatatttccaaccatttaatcttaagtcatgacgttgcttatcactaggtgcaattctgctcttccattgttccttatcaaattgtctatatgtagggatggattagggaaaataataggaatttattaagttaaaacaattttttaatatgaatacttactcaaacaaagtgtccatctcagaaatattagtaagaatatacaagaaagcagccttgtactcctccactgttagatcacgacatgtgcgacgattaaaacaccgaccagggtactggaaaatttgaaggttacaagaactctcaaatgtagaggaaccatcatcgtatcgagggatcttattcctagttgatctcacattgtggctgaaataaagtgagaggaaatttgtgttttcctccactagataagcttcaacaatggatccctcaacacgagctttatttctaaccttttttctaagtctcccaatgtacctagaaggttgacaacactaaattaggaataaatagttgtaaggacaagacaagcacttatttcgaatactatgttaactaatatttttacctctcatatggatacatccaacgggctagaacaggaccaccaagatgagcttcacggggaagatgtacaattagatgttgcattagattgaaaaaccctggtgggaatatcttctctaatttgcataaaagaacagcaacattctgttcaagtgaatgtacaacatccttgcttagttctttagcacacaactgtctatagaaaaaactaagctcagccaaacaaacccatatattttctggaaggaatccacgaaaagctaccggaagtaatcgctcaataaaaatgtggtagtcatggctttttagaccaaatatcctccttctcagtaggttgacccctcttctaatattggctgcatacccatcagggaacttcagatcttgaaaccatttgagtataatagtcttgtcattcttatctatgcaaaatgctgccctcggcttgtgccacttgccattgcccttcaattccaagtgtaatgagaggcggttgcaaatatcaaccaaatcttgtcttgccttcacattgtcttttgtcttgtcgggtatgtcaaagcacgtgttccatatagcttcagctacatttttctcattgtgcatgacatcgatgttgtgtgggaggagtaatttatgaaagtatggtagttgccaaaaacagttcacatgggtccaattgtgagttttaccatagttatttctatcagccacatgtgcatacatttggtcccttacttcctctccctttaagatccttggtgcttcatccaatactacggtgttcttccgaaaagcattagcttggaatctgaactcatggtctctaagtagaaaacgcctatggcaatcaaaccaacatgctttgccaccattacggaggcgaaatgcttgcgtatcacataagcatgttggacatccaaaaataccatgggtgctccatgcagcaaaattaccatatgcaggacaatcatgaacagaccacaaaaaggctgccctcatgttaaatctttccttgcgtgaagcatcccatgtttcaaccccctcccacaacttgaaaagatcatcaactaatggttgcataagaatagatagcttctttcctggatgttcaggaccagatataactagtgaaaggaatatatattctggtttcaacagtactccagggggcaaatttagtggagaaacaaagactggccaacaagaataaggagcagcaccaatattaaaaggtgtgaaaccatcagttgaaatagcaagtcgcacatttcttgcatctctaccaaaggttggaaaatctatgtcaaattgttgccatgcttcaccatcacaagggtgcactagcttaccacatgtggactgtttatgtgattgcatagcctttgcgatctcctcatgtgcataaagcctttgcagcctatcagtgatgggaagataacgcaaaactttgcgtgggaccttattctgtccatcctcaaatcggggggtgttataaaagtcacacttatctttatgctcattttctttgtagtataacatgcagttattatagcaaacatcaattttaatatatgtcatacctaggccctacaatagtttcttagaatggtaaaaatcctctgccaacttagaatcaggtggaagaagttcatggatcagttgcaaagtatcatcataatgtgcgattgacatattgtactctgactttaaatctagcaaacgagcaatagcagataagctagtgtgcattgtgttgtcatggactgactcattagccccatccaccattctatagaaagcactagcagaagaagttggctcttcatcaattcctggtggttggacagcccctatatcaagtaacatctcatccatgcaatcaggttgatcaaacccctcctcatgggccaagggagacactggttcattattcctaatatgttcttccccatgggctgtccatgtctcatagttttccttaaagccaaatttacacaagtgtgcctctataatatcccttgtatgtctcatgtagttgcgacacctaccacatggacatttaatacttccatcttgaactaaatcaggtatagagaaagcatggtctagaaacatattggtcttttcaatccactcattagagggtgcagaaccataatgccaaccattatacatccaattacgttccgccattatgttattctgtctaaagcaatatcatttaactatcttagtatataaagtaggcttggttaacaattagatcacatccaaatggaacatcaaaaataacagtccaacttaaatggccacaagcatgcataagtatcttagctaggtaggtgaactagagcttaccagattttgttgaagctaccagaccagcacgtctgagagttaacacagctagcgcatcaacaggtcaacaaggatagttcaccaggcttcacagattggggcatccttgaaaagtattacatagatctgtaccaatgcatatgaaaaattcagttttgctgatattaacaaaataacacactgtgttctacttttgtatagaagctacaactaaatatgcaaaataacttccaatctctcatgcatgtcagatttaacataaaaaatcaaaacatacagactgttttgcttactatgtggaggcaaacaatagcagaaacgacttcaacactgaaggaggacttctcttggacttcagtagggacgggcagcagttgcggaatggcggagcaagggccggctgtaagggtggcggtggaggtgttgaggctgacgggatggtgtaggggcggcgcgggccgatggacgggcggagcagaaacgagtaggggatgggcggtggggggatgagggggcggcgagttggggagggaggcggcggtgctaggccggtcgatgggcggagcaggggcgagtgggggaggggggaggcatggcgagtgggagagggagaggcgaaggcgggcgcacggtggggcgacggcggcggggccgcgctgctgagtagcgctacgcgcctgcgcgagagagaaaggagtcgatggcggcggtggatctggagttccggataagattggggattttactaggttacctcaattttttttgtgggccggaagcccaaaatctacagaaaaaatatttcggagggcgccaatattcccgcttactgaaattttggcgccatattttcctgttccctcgcgccacaaattatcgtgacggtaaaaagtcaaaaaaaaatacagttctctactgccaaggagggaatgcctatttttctgtgggccgtgtccaaaacctacagaaatattacatttttctatgggtataagtaagcccttcacaataatttatatttctgtaggtttgtttcgaaacgcacaggaaaaataatgacctacagggtagctccaaagtgtggtagtggaaataattaatggcgctgcatgcaatacgttgtctgctgaagttattggcacagtcgtactcatgtatgctaattaagctagtacagtagtgctacgtacgacctcgatcgatcggtctttcttgtgagatttccatgtcttgccgacgacgtacgcaaactactaacagaagaagcgtgtgttcttcgctagctgaaacctgacgtgttgcatcttccctccattccaaaattgatctacatattttataagtacaccaaaacctaaaaagctaataactctctcatactatatttactctagcaacacactcaatgcatgcaccatcaccaagacccagaaaaactaataactctctcatactatatttactctagcaacacactcaatacatgcaccatccccactactccctccatttcaaattaatctacatatttcataggtacaccaagaacaagaaaaactaataactctctcatactatatttactctagcaacaaactcaatgcatgtactatccccactattttctagctaatagcaaataaagatattgcatgtgggttataaatacttgtgtgcatggatgcatgcatcaatatccatttactccaatgcacaaataacgactagacttaataaatgaacacaaatatgtagatcatttagaaataacctcaaaaatactatatgtagatcaatttagaatgaagagagtatttcctagccaatagcaaatcaagatgttgcatgtggttataaatacttgtgtgtatagatgcatgtatcaatgtccatttactctaatgcacaaataacgaataaacttaatgaataaacacaaatatgtagattatttaggaataactaaaaaaaactatatttagatcaatttaaaatggagaaagtaccatttagcaccaccgaggcaccgatgagacgaactggcttcgatcgaacagacaataattagcaaattctacccattgcgaagtcattggcgctgaagattgacttgctcaggccaggccagccagctcccgcgccggccttcctccgtttacccggacaacccggccggcccatcacgccaccgagggtcgcccgcaaatccatgcattcatgatgcaatcatgcaatgatgcatccctctgccaccatcgatcgtgtgcgggcgggaaacagactttcatgcggggctgcaagccggctggccctaacacatctgacacgtttacacgctcgcacgagattacgagaggacgttcgcggataagatcggcatgcagtgattgatatatcaatggactatgcgatctaaccaatacaacttgtgagcttcaaaccaaatccaaatgttgaatgccagatgtgtacatgtatgccgagcgctagctcacagagtagcagagctagcatgcactgaagacaaacccggtgtgtgcactccccaatcatcgatccgatcgagcgtcctgttcagtcaatttcgcccttgttgttttcttttcctggcccgaaacacggtgcagcgtccgcccgcccacatgtcgcgccacgcgcgggcaccgcaccacccgcggccgcagctctgccgcgctcgctccgtccgtccgtccaatgcgcgcgcacaggagaaaaggcccaaaaggaacgagatgggcaggagcacgcacgcacgcactgaactgcacgggcgcgcccgcggaacgcgctgggcgggggcctgtcacgtagccggggcggaatccgccagttgtccgcgtcgccaggttcggcggctggggaccgcacgccaactcgaaccccaccacgcgccgagatccgagccgcgccccgcctgccacggcgcaccccgtcgcgcgcgctactcccaacgggcgctcacatgccgcctcccccgcgcgccctccggaaaaatattcggtggtgacaggctccaaaggcactcgcacgctgcaccgaaaaaaatcgtgcacaagacgtgtcgatccaaagaatccaaacgtcaagccctatcactaaggtacccgcaatgattatctatagactctctaaaagtgatccatgtcagtatattttcctacttagaaaaaattaaatgaagagaaagagcaaagttatctactaacctgaagatagtctatagagaaaaacaagcaatgtattaaagagctatagatacccatatagacatactattgaggtggtttactattaatctagtctattgctgagatgtacatgttttataaagagcactttactttaccattgcgggtgctctaagaacaattataatagcatgctataagccagttataaacacatttccaggagataaaagaagagagagaatggcagcgggctatagatttatagccagctacagcacggactctaaggtgcgtatgtgtatgacaggtgagaccagatattaattatgcaatatatgtttataggtaattattgtatgagttggctattaagttgactatatatggtttggagccaacagttggttatactattaaacttgctctaaggccattcccaacccaagacactaggcataatttttataaactccacatcatcaagaaacttgtactagacattactcttccaatgcaaacaccactattccatacttaaatttagtgctacttatctcacatgatgtcttggatgttgtgtagaaaccatgtctcatgcaagacctggtttcattatctttcctcatttattcatttgccatatcatctttcatcctaggtggtagcttatttaatactacggataccatcctattaacccaattaataggataggatggtgtccgtagtattaaataagctgccacctaaaatgaaagatgatgtggcaagtgaataaatgagaaaagagaaggaaatcaggtcttgcatgagacatggtttctacacaacatccaagacatcatatgagataaatagcactaaatttaagtatggaaaagtggtgtttgcattgtaagagtagtgtctagtactagtttcttgataatgtggagcttatggaaactatgtctagtgtcttggattggaaatggctaagttctcgcaccaactgacgccttccacattcggctcggttccccgtccaagatgaaactggaatcggctcacccacatacctcgtccgcccgtcttcgccttcctcgccccccgtcggtttctatcgtcaacctgcggcatctttggcagatcacaagggctgcgaggaagccgccaagctccggcgagcactagggggaaccagcctatctcaatctcctctttggttctactgtcttatcactcatcaaacaatagaattcttgagggtactaaccatggaattgaggggcttctctgatgaacgaactgatgagcatcaaaagaaatcttcagacgaccactccaagctaagcaagattattcagcaacggtaagcaattcctaaccgatgggtatatgagaatgataaggtgagggccaatggccaagcaattccatgccgttagcctcctaatctccgcgccatgccatgccactgcgcccgcgcattccctgtttacacccaaattttgcacctatagatgaaataggggaaaattgccaaagtttgaaaagtgtcgggtttccttcacagggccggtcagaccagaggtatgtgggcagtctgaccacaggtatgtgggcggtcaaaccgtcagggtccgagtccgagtttgttttcgtcgggtctctggtttccttgctcgggaaggcatgtttcgggtttcttttggtttctatcccgagttgaatgtggagaagggcctgtagagggcaagaccaacccctatttaaaggataaggccggttcattgtaataccccgaatacaatctacttaaatcgttcttttaccatgttttctattttaccctagttttagtccatctttgtcgatttgcgttgtaaatcgtctgccgccgctgcgagagtgcgacacctctttgtaggtttgtcctgaaaaccttccgttttgcccacgagacgggtagttatcctcatatcgatctaaatcggcctagaggctgattttgatctctaaatcggatccgttagccggtttagctgtttttctacaaaaaccatcttgatttggttgtttggatcaatcgaggtggttggcgacttcatatcaccacaaggcgtttaggtgttgtaatcatgcttgtcgacttgtcacaaaaagttgccaacacgatttttggctactccgttggggaaatctgctcaacgtcatctcaccttcgacgctgccatgacaaagcctccatcaaccaaggtggagatggaaccatccaatgccatacaatcccattggaggagcttgatggggaagcatgcaaggccatggaagagcatctcaaggcatatacctaggagatgttgatgaagtcgtgcactaggacccatcaaggtgtggttctcaagccgggatcattgcctaaacctatttttgatgtggtaagtactgaagaggtatcaacttctatccaacaataaatagtgagtacaatagatttattcattgctactttaaatactaaattagatgcatctactgaatcttgttttgatgattttataaggaacaaactcggttctgtcatagccaattttgcattcaaagataaagcctctaccagtactagcaagcctcctgtagatcaaatatatagtaaaaccgatggagcaaatatgcaaacaaccggcaaagggtgggctgtgcacacggccggtccgaccgcgactttgccagcggtcagaccggaccccagaccggtctgaccacgcctctggatgccggtcagcccgggccctggaccggttagactggcgcaattatcccgataaaggggattgatcctatgatcaataacggggttttataccatattccagtacatgattcccctgtatctactgttagtcctcaagttcccccacatatcccaaatgcttataatgatcctattaggagatatcctcccgatactaggtatggccaatataattatattgcgccgcaaccataacctattaggccaccaaacccaccaccaaatcagcataggcctgaaaatatggaggagttaaatagtatcattattagggataaatttgggattgaagtgatggatcatgctagggagtaccaaaagccgtatcctgattattatgacaatatcccatatcctcgtatttatagagttcccaaatttaccaagcatgtaggacagtttttagcgcaatgtggtgaggctagtaatgttgatacatgtaaattgtgcttgttttctttatctttgtctgttactgcttttacatggttaacttctttaccggcaaattctattatacttgggctcaattagaacaaaaatttcatgattatttttgcactggtaaaactgagcttaggttatctgatttaacatcagttaggcacaaatacaatgaatctgttgctgattatattgagaggtttagtgatattaaaagccgatgttttagtttgaaaataacaaagatctggccacattgcatatgatggattgtttgattctattaaagagagattgaatggccatatatttcttgatgttgatcgtgtgttgcgtgaagctttggctcaggaaagccgagtggatgacaatagcttaaatactagtttagatgataatgaaatagcatgtatagccgaatcaagtgttggttcggattgtgttactagtttagacaatgatggagtagccgaaccaagtgatagttcagattgtgttgctagcttagataatagcatcattgaagatatagccgaactaaatgacggttcggattgtgtcacaagtgaaagtaaaatagtattgtctcctaaggccgagtcacaaatcggtcatgtggatgttggaaacgatagtgaaaatgttttgtggaatagtagtgaaatagaatccaaagtagctatgaatatatatcaaaggccgtatcctgaacacgtagattcggacccatagccgcaagaatttgagatgcccaactttacgaaattcacaggtgaggatgctagaccaacaatggaacatatcggccgctttattgatcaatgcggtaaggccggtggtaatgatttgcttaagttgaagttgttttccctttctttgtcaaactttgcatctacatggtataatttacttgctcctagttcaatttctacatggtcacaaatggagcatgagtttcatgattattttaaagatgcaagcttgatggagcaaagaccaattgatgattcatcggtcacttgtgaaactatttcggttacacctatgcctaagaccggaattgttagtgatcctctccctattagtcctattgatgttgacaaaaagaaagggaaaagtgttattattggggatcctcggcccgagacaattaagatcaataatgcaaaggccgaagatcgtaaagttgaaaaggatgagtcatctaattcccaaaagactaaaaagccgaagctcacttttgagatacttatggctaagtacaagaaaggattagccggtcagcgattcgataaccaaactagtgattcaaaaagaccaagatcatctcgtaggaagagatttggtcaaacacccatgcaatcggagccatcaactatatcaactccatacaaacctccggttgtgatgccatggtatccatatcaaatgtcactatatggttatccttttatgtattacatgccgtggatgcctcaaccacctatgccatttcatcaagagtggaaggaatcacctaggtcaataccaagtcattcatctaattctagtcaagattgtttcccgcgaaagaatcggtccgatggatcaaatgtgaaaaatgtgaagaaggtgtgggtaaggaaagaagccaaagctccggaggtcgtcactatcaaggaggaatctcaatacgttcaagtacctactggagatgcggcgaaaactatacaagcgaataagactgaagccgacgccgtgactgccaacagtggtggtctgaccgaccttactggccggtctgaccgaccgggcctagaggccgatctgatcggggggcattaaaggtgagcgggaaaattgagaataagccaggagcttccacttctactaaaaatatcaagaatcatcatttggctcccgaaaaacaacaacagctgaagtggataccttctggcttatctcgctctcaaaagaggaggctatagcgtcttcgagccataggtcaaaaagaaaaggaggccaaagatgtgaaggacaaaacatgtgagaatttagagcctcggacatcaagtaagcgagtgtggagacccaaagaggtaaaaattaagagaccggtgatttcccatagtagtgataagtccaatttgacaagagaagaatcatcggtcattacagataagtctccttcacatgatgctatgggtgttagtgcggtattcatctagccttcgaaatcgtgcaaccaagaaagccgattttgcttggggggcaggacatcaatatgcttatgaagaaatcaagagagatgaacggcgatggatacgacatcacatctttgagccgccgtttgttggatgctaatgaaaggtatgagtttattgtgtttaccattatattatatgcctatgccatgttagaacattgcttgctatctagcacatgtgtgtttttgcttatcaaatcgatattatacatacatgttgcaaatgccagttctaagaagtggaattggtaaattggcatataattttttaaagtatgatttggctcataagtctttgatatttattgacagccaaatcatatgtgtttttgtgggtcaccatataatatatggatttcatatttattgcaccatgaaagttttgcttattagtaattcagctaatgtcaatggtcaatgtgatgatttgttctagagttgttttctttaggaacattggcattgttaatattttgcatacatgctcaagccgattacttacatttgtagtttattggagtctatgcatgtgacacgtatcactttggtgattcattattgatcatacttcaagtggctaagtgtttttgatgctttgatgactcttgtttcaaaagccacttgaattagtattcatctagacatattagttggatattataattttttatatgtctagaaagaagaaattttggtccaataatttgatacaccaagcatctggctataacgtgaagaaaaaatatatactaaaggccgatgcttgatttcaaaagtttggacaaaattggcaaagtcatagtccaggggtggtcttactggcatagcacggctggtctgaccggctttgcatggccggtctgatcgggcagacggggcggtctgaccggcattgcgtggccggtctgaccgatctcaaacagaaagctggggggcacgaaacaattgatctagaggccaaattaattataaattcggacatttgtgcccatgagtcagaagtaaattggagaatccctttgatggaatatttgaaagattatagccttagggttgatcaaaaaattcggcggcaagcgttcaaatacactttacttgattgagagttatatcgtcgaaatatagatggagtactttttctaatattgctatttgagaagtacgtgaagggatttgtggaactcatcaattggcccataagatgaattaattgcttagaagagcggggttctattggccgaaagtgattgatgattgtttcaagtactatagaggatgcgaagtttgtcaacggattggcaatgttcaattggtgcctaacgctgtattgaatcctatcatcaaaccatggccgttccgaggttgggctttggatttcattggtcaaatttatccttcatcattaaaagggcatcggtttgtgctagttgcatcgaattacttcattaagtgggccgaaaccgtgtcgttcaagaatattacttacacggaggtaattgactttattttgaagcatattgttcatagattcggtattcctcaaacattgactacggataaaggagcttcttttatgtccaaggaagtgagaagttttgccgaatcttatgatattaagttgtggagttcttctccttactacgctcaggctaatggataagctaagtcgagtaataaaacattgttgaaattagtcaaaaaggagattgaagaacaccaaaaaaaagtggcatgggtgcttttagaagctttatgggctcataggatatctaaacatggtactatcaaagtcactccttttgagttggtttatggacaaaaggccgttttgtcagttgagataaatcttggctctcttcagtatatcaagcaaaacgacttgttgattgaagattacaagaccttgatgggaggcaattttgaaaacatcatcgacaagcgtttgaagacttttgaagagatggagacactaacaacatttttcggagagcaatcaatgggaaatacttgaagaaatacttccctagcgtttggcaagatgcttaggaagtctcgtggccggtaattggattatcatcctaagacaacaggcaaatgctaattggcgcgtatgcgccgccggtgcgtacgctgccaaaagcagcccaaagcccaaagctcaaacccatataaagtttctttcttttctttttttcattttcatgcagccacgtttcctttttttttccttttttcatctcaactttaaaaaactttcaactgaaatttgaaactttctactcagatttgaaaactttcaactcaaaatttgaaatttttgaagtcaaattttgaaaactttcaacttttcatctcaacttttaaaaaccttcaactgaaatatgaaactttcaacttaaatttgaaaactttcaactcaaatttgaaaactttcaactcaaatttgaaaactttcaacttttcatctcaacttttaaaaactttcaactcaaatttgaaaactttcatctcaaatttgaaaacttttaactcaaaatacaaaaacttctaactcggattagaaaattttcaaatagatatttttgaaaaactttcaaatcatattttgaaaatttacaaaatcaattgtttttatttttttagtggaaaattactataccattctcactaatcaccatgattaatgctaattgttaggattagtgacgcgttgtcggcggaggcgcgcgtgcgcgcgagttagcgtcctcgcgcgtacgcacgagctagccatgcccaagacaacatgttctatgcttttagattcacgatgttcatcaaaaaggcagggggcatgtgtttacacccaaatttggcaccaatggatgaaatagggaaaaattgccaaagtttggaaagtgccgagtttccttcacagggccggtcagaacacaggtatgtggccggtctgaccacaggtatgtgggcggtcagaccgtcagggtccgagtccgagtttgttttcgtcgggtctcgggtttccttggtcggaaaggcaggtctcgggtttcttttggtttctatcccgagttggacgtggagaagggtctgtagagggcaagaccaacccctatttaagggacaaggccggttcgttgtaataccccgaatacaatctacttaaatcgttattttactatgttttctattttaccctagttttagtccatctttgtcgatttgcgctataaatcgtctgccgccgctgcgagagtgcgacactgttggaggcataccacgaagggccttcgtccgggcctgctgaaaccaagggcttacgcgacaagcttagaccagaggcaagcggcgaagatcgagaagggaaccgtctgggcgaaggcctcacagcgaaagccatggcccgggtttcgcctggccatagacttcgtcagaaggcgatgcgagtgaggatgataaggcgaaagccttagctggaggatccaggtttcgcctgatgccgaacctcgccgaagaatggcacaatgggccactgggcctagaaaggtttcgccaagtagacgggctgagccatttatcccaataagggcccatgtttgtaaaggacacagtgtgcccccaataatatccctatcataagggtaaccatgtaaattctcctgtaaagcctaaaccctaaaaggggaacctgtaatagggctataaatagccccctagagccatgtaatagggggatccaaacatttttactaagcattacaattgtttttacttccaaccactgttgagagaaccacgcctttcgacgtgacgcaattgtctcttcggtaacagtaggtttgtcctgaaaaccttccgttttgcccacgagacggtagttatcctcatatcgatctaaattggcctagaggctgattttgatctctaaatcagctccgttagccgttttagccgtgtttctacagaacccatcttgatttggccgtttggatagatcgaggtggttggcgacttcttatcaccgtaagacgtttaggtgctgcgatcgtgcttgtagacttgtcacaaaaagttgccaacattcccttgtccgtttccgcgcgagaccaccccgggtaagtggacagcggagcgagccagagggaggccggcgctatcgtgcaagcaagctcgctggcttggcctatcccccaacaccggccggtacaatattctgctgccactggccctagttccactatgatatgacttggtacgtattatgtggtggtggatcgatggatggacctgccgcacacccgtcttggctggcttgatcctcgatggagttggtggtgggtccttgttgtcacataggcatcggcctgcttctcctttgtcagctagcactggatttgaagagcatcgatcaatgcgtgcatgcgttaatgggagaacatcatatactatagggcctttctcagtgttttgcttgttcgatctgcatgcatgcacggtcgagatgacctccgcaaaaagctgcaactagcttgagtcaaaccggatctcatctttctctagcatctccgatggccaatgcgttacataccatgcacgagctaatcctagtaatccatccatctcataaaaacaagagggctgctagagtacgatatctcattcgtcatgtgcgtctccactttatcgtctcatgagtccatggctccgttccaccacatgtcaagtgctcacgccccagccggtggaggagcacacgtgaggtgctagcagaaggtgacagcacatacggtggcgcatagtggccaaagttggttcccacagcagcatggtgagcctgtaccaacaccaaagaggaaaaatgaggagttagggaaaggagtgaaagggagaagacaagccaaaggcgctgatggtggacggctcaccacctggccaagcggcaacgatgcacatcctcttcccacacattggtaccttgtacttggtacctatggggtatcgtttggtacctacaggtatcatccggtacccgaagcaggggcggatctagcatgggggtggcggggtctcaagccttcactactggcatgggaaccatgggagcccccacgaagcccccactaaatttttgtgctataagttgataggaagaggggctataactttgtctagtttcttcagaccctcatgttatttcttcctatatctgccactgttcccgaagtatcaaacttgatactctcgagtaccagggctgatacatgtaggtatcaaccacgataccacaggtgccaaccctgaaatctgtaggtataaaacatgataccacaagtaccaggctggtacttgtgggtaccaaccgatcgagccaagggtggtacatcgcatgacatacctaagctcaacaacgacgagtagcatggtgtctgcatcaccacgtcgattgtcaatggaagccctagatctggcacctgttggcggctgttaaatgtcgattctataccgccaacatctgcataaagttcggataataaaacatccaacatagtggtaggtgcttaatctcacatattcacgagtgttggtatatatttgtatgcaaacgataaaccccgatgttgggaggaaaatcagactaaagtgaggagaaatatgtatccatacaaggatgggttataaacttcatcgaaacatcagtgaatcaacccaaaattccgagaaatggacagaggaaggtccagggagtccaccgaccgaaggccaggccagcagggcccagcccaagttcggccgaacaccctggttcggccgaacccccctgatcaccgttgatcctggggtttggcgtggacgctccagatgctctcccaatgacggttgcggggcagttcggacatttccccttctcacagccgtcatacctacctctatataaaggcttcactccctcacttcacacacacactttcaagcttgagctgaattataagaggctatattgtactatattgtatactagaataggaagagagtagagtagaaggagtcggaagaattccggagttgtcggtaatcttctcctatttcttttattctgtttattactctgaattcaatataatatttttttgagtaatttagatttatcttgtgataattatctcttggttagttcctaaatagcatatgggattattgttcactataatcaactaaaatatagtgattgctttggtgagttataaacactaaaatagatagtaattgcttagacgtggtgtttaggtaattgttatccagtaattgctgtgtatcccacagtacgtttgaggtgggtgtagaggtggtgacagccctcgagatcacttaagtcctccctgtccgggtacgtagtagagcgacatctgggaacagcgggttgccagtgcctgaagttttgcattaggattaaagttaagctttccttagacactgtttctcactagtaaatcctctctatcctggcctatcatttgcttggtgtcctcggatgaaccggaggaagatctgaccacactcgttcccttggattcgatacccttggaatactccataggggaagtgctacatcggtatatccatgcgcttgcgaattttgtctgtaatcgtaagaaataccaacaagtgtttctggcgccgttgctggggaacggttgctgatcatttccgaaccttgttcatcctcgtatcctttttgtttcttttattctaccttcacacttgctatcctagagaagtttcatgtcaaactcttctcgaccatggagcaacctctttttgaactgtctgctcctcggggcgaattctatgagccacctccttcatcggagcccatttatacaactggctatgaaattcgtcccgaactaatcagtatggttaggaaaaatcctttttctggatttgatctagaaaatccctaccatcatctgtgagactttgaacaagtctgctcgtgcctttagattcatggcatgagacaagaaactgtgcggtggaaattgttcccgttctctcttcaagagagagcaaagcaatggtacacctctaccgttggatgtgtaaatggtagttgggaaaagttgcgagacagattctgtcttgccttcttcccagttactcgtattactgccctacgagtagaaattctcagttttaagtagataaaaaatgaatcaatcggtgcagcttggtccagattcactaatttagtgcagtccggaccaaccctgtccttacccgagtatgtgctactccaacatttccatacgggtttggacaaggagtctgcattctatctggacataaccgctggaggatcattcatggacaaaacgccgtcagaaggaaggacaattttggaccacattctagaaaatacttccttcatgacgtagtccaatgaactccagccggaggtatccgtgtccaagataggggaacctctaacgatcgagctacttgctgaaccatccacttctgttagctcggttgatgagaaggttcctgagcagctgtccgtcgagaatgaagaaattcagacttcggattgtactgcaatcctgttcagggacggctttgacaaagactatggcaataccctgaactattttagcaagaggaaaccactcgttcctttgccaccttccgatcctatggaactcgggttcatacgagaaactgtccgggagttaacatccataatgagcaatgaatggctaagggaggcaaagctttcatccgaagtaattaggataaataccactccccgaatcattccttgccatctgaaagggaacaacgtcggtattctctacagtccaactatcggggccaatctcgtttccgagtctttggcattcacttatttaagcaataaggcagtgaccccgacaaacaaattcttcaagcatccaaatggaaatatcatcgaaggatttgggattgtgcaagatgtgcctgtctgctttgaagacaaggaggcgatcttggatttccatgtctttgaaatccaagattttgacatcctaatcaggctgcccattgagcaacttctcatcaacacaccccgattaggtagcctcaaaataacactgggagaaaatgaattttcaattccattctcacgagcaaggatcaccttgactgaccctctcccagaaattgagtcagcgaaagaggttactgcaattccccctcatgagtctcctgaggcccttcttgatgatgaggtccccgatttcatcaaacaggaagtggatcccggtgagactcttgacctgccaatcatggaaccaccacctcgacctccgcttgaacttaaacctctacctccatgcctacgttatgctttcctacacaatgacagatagactcctgtcataatcagtgacaagctctctgaagacgagactcaacgtcttctcaccgtgttggaaaagcatcgttctgtttttggctactcgctagcagatcttagggggattaatcccacgctttgcactcatcctattcctattgaccccgagtgtactccctccagggaacctcaacgacggctaaataatgcaaatgcgagaagttgtaaagaaagaggtcttgaaactcctgcatgccgggattatttaccccgtaccacataatgagtgggttagtccagtctagctggtgcctaagaagggagggatgaaggttgttgcaaacgctcaaaatgaactaattccgcaacgaaccgtaaccggatggaggatgtgcatcgattacaggaaacttaacaaggctacaaaaaaggatcatttcccgctacccttcattgatgaaatattggaacggctagcaaatcattcctttttctgtttccttgatgggtattccgggtatcatcaaattcctatccatccggaggaccaaagtaagactacgttcacatgtccatatggcacctatgcataccgtaggatgtccatcggactgtgcaacgctcctgcatctttccaaagatgtatgatgtccattttctcggacatgaacgaagatatcatggaagtcttcatggatgacttctcggtctatggaatgacttttggtcattgtttgcagaatttagacaaagtcttacaacgatgccaagaaaaggacctggtgcttaattgggaaaaatgccatttcatggtccgtgaagggatagttcttgcgcgtcgagtgtccgaacgaggaatcgaagttgatcgtgctaaaatcgatgctatagattagcttcctcctcccgtgaacatcaaaggaatccgtagcttcttgggacatgccggttttatagaaggttcatcaaggtcttttctacaatcgccagacatctgaccaatctgctagccaaggatgcgccctttgagttcgatgacgcgtgcctaaaatcttttgaaattctcaaaaaggcactcatctctgccctaatcgttcaacctactgataggactctacccttcgagatcatgtgtgatgcaagcgatttcgttgttggtgcggtcttgggccaaactaaggataaaaagcatcatgcaatctgttatgctagcaaaactctaactggagctcagttgaattatgcaactactgaaaaagtgctgctcgcggttgtttttgctatcaataaatttaggtcttacttagtgggagccaaggtgataatctatactgatcatgctgcatgtgaaatacatgctcactaagaaagatgctaaaccacgtctcttaagatggattttgctgctccaagaatttgacttagaaattaaagataaaaagggagtagaaaattccgtagtagatcatttgtccaggctgcagatcactgatatgcaggaacagccgataaatgatttcttgagagatgacatgctgatgacggttcatgactccaacccatggtatgccaacatagtaaactacatggtatccaagtacataccaccaggggaaaatcaacgaaaattgaagtatgagagtcgccgtcatatatgggatgagccatagctatatcagatctactctgatggcttactacgaagatgtgtgccaactgatgaaggacttaagatcatagaacgatgccacgcctcaccctatggtggccattacggtgcattccgcacccaggccaagatttggccaagtggtttttttctggccaacaatgtacgaagactcaaaagaatttgtcagaagatgcacaagctgccagaggcaaggaggaatcactggtcgcgatgcaatgcccctcacatacaatttgcatgtagagatattcgatgtttggggtatagactttatgggacctttccctaagtctcacaactgcgagtacattctggtggcagttgactatgtctccaagtgggttgaggctatgtcgtgcagcgccgcggatgcgaggcatgccaagaagatgttcacagaaatcttcccaagatttggtacccccaggatggtcataagtgacggaggttctcacttcattgacaaaaccttccgagacctcctacgagagatgggagccaaacacaatgtggccactccttaccatccatagaccagtggtcaagcagaaacatcaaacaaacaaatcaaaaatactctgcaaaagacggtcaacaatatgggaacaagatggaaggatagattgccgaacgcactgtgagcattccggacagcatacaagacacccattggaatgtccccatatcagatagtctacggaatgtcatgtcgactacccgtagaacttgagcacagagcatactgggccatcaagaactagaacatggattttgaaggagccggagaatggagaaaaatgcagatcgctaagcttgaaaaatggggagagaaagcctaccacaacgcaaagatttacaaagaaaggacgaagcgctggcatgacaaaaggataaaaatcaagaaattcaagccaggagacaaagtactgatgttcaactccagggttaagctcttcggccacggaaaactgcgcagcaaatgggaagcaccgttcgacgtcatcgacacctcttcgcacggggcaatcacactccgcgacgactcaggtgacatatttaaggtaaacggtcaacactaaaaattttccttgagccaaatgaaactttagatgaagaagtggatgttattgaattaattgattatgaaccatgatgatctcatctattgcatgcttaaaaccctgtatagttgtcatttatgtgcttagttcaggatttattgggcctagaaaaataatagaggtcaaccagacccaccagggttcggccgaaccaaggaggcgcccgatcaccccccatttttgaacttcgctctccccagctcgttcctagtttgtttagatgcgcgtttggagtagaacgttcggatctcaccagaacacttcttcttcctcttcctctccatctttgcatactctcctctccaatccaacccaattccttgaattcccactcacacacaccaatggctggcaaatccttgatcccattcatcggctcttcctccaattccacttacaacctcaccgaagagccgacaccggcaaaccaattgattccggtggaagaatacacgatggaaggggtaaacgctgtatgggctcaacccctcgtagctatgccaggctccctgcaaatctggagcccgtcggcgagcaccctggttcggccgaacccctctcggccccgttcggcagcgcgatccctctcccctcgccatgtcacaaggacaaaaatccggggggatttgcctgcgcgacggccgacaatgggagaactcggcttgttgaaggcacgacgccttttccaagatgacgggaaggccgcgccgcctcccgccgagcataatgtgggcaccctgttcaccaaggcaggggatgaggtgccccataagtatgtcacacccaccgctactccatccactccgatggaggagcgtttccgcattcagggagtacgaactcccggcggtgggtatggcaagggtttactctggcctttgacggcatcggagaagaagggggcagcggaatcccgtagccctccacctgtgaagatgaggtgaagtcgccagagccctcgatccataagctcgccgcgcaagtaaagaaactccgcaaggagaacatagagcttagggatcgcaacgcggagctaggggtagagcttgctaaaattaggaataatttcgatacccttagttgcattttgtgcgctaagatcaagcgtgcattcgtagaaatgggaaaggaaaataagtattatgctaattagatgtttcctttcccatgaataaaatagtagtaggtgcttggtttttatttttccaatcatgtaagcacttgctatgaataatgtggctcattggtgttaaccccaatgtttgccaaagtttgttttgttttatgtttaataaagttcaggttttgaataagtgtgggggagatatcccagtttctgacgtgcacataatctgaaaattgctgaaaatctgaacacctggaaggcactaaactctgcagaaaattgcagaggtattgggcaccagagtggttcggtcgaaccagtgttggccccaatacctctcagttttcacaggtaagcaggtgagcacgtcttgtacctatatatctccaccattgtatagtactagagctgaaaattcataaaacaattggttcaagcataagtatgagattaaatttccaactaatgaaattcttcatgtgattgatcttgtatattcattattctcagttgaacttgtgcttttgtacaaccatccatgttttgggaaccttatgcatctaagtaattgctatatgagagatgattaaagatgaagggaattcttgcaactcttgttatgactcttgggaatttgttttcaaaataaaattgttttaaaagctccatcctccatttgacttcatcttatacctaccaaggccatatgcaagtacattaatgatcaaccttatcatgcatatgactgcttgacattatattgagctttgtcaaatttgtgtgacatgtgttagatatctttcatactctcatgatcaaggggtcattatcatttccactttccattcccacatataaaattaagctaagcttctacactggaagttggctttccacaaaaatatccattcaaataaactcctacattgggtattggggtacgttggaacgagggtccacgtagcacgacatcaagcaaacaaaagacaaggattatactagttcaggccccttatcaggtaataaccctagtccagtttatatgtatttatgatgacgagaataggttacaaagagagtagtcggatcagatgataccgacgagatcgtagtcgaggaattcgtcgagatctcccgacgatttggctccacgtactctggcttcgtaaactatggtgggtgtgttggcgatggaattggatgcctttcacccctctctgggggtcccttttataccgtggattatcttgacccccaagaaagatttgaggatatcggatctaatacggtataatagaaactctatcccttccgagtaggactttggaaatcacttgactcgtaagatattttccataagacggattcctaacgatattcataggaacgatccgtatacgtgaaggtataccttattggtatattccataaatcgtaggatagaaggtatgacttatccataaccctgacattagccataaataatgaggtatttttcccaaacaaagattattttctaaaaattggctagcctcaggaattgccaaccatgccctctaaaaaaacaagtacatcacaaatatcacagttttccacaattcagcacatatacatcacaaaattaacattacacacaagcattccaaaatcccacacaaagtttatattgacaatcaaatattcctaatgcacatgcctaccttacatttattttgagcctgtgaagcaggggttaagataatcaaagggtaaagtgacacacaagcattaactactcattctcataatataccatataagctaagtggaaagaaaagaggaagaaaatctattcctatacttctaatatccatagtatacatacattctagttaactgatatactagctaataccctctatccgatgccctcctggtacttcgagaagccacccctgactgccgagttccttatgacagcccgtcatgaccatacaaccggggctaaatacgttggaataccctcccagggaattaacttaggattatataccggcgcggaggaatacccgtactgagctgtcaccatcagcggcccatctctcatccgcaatatataactccaaataatgatatcccgtaatctagacaccacgcctaaactaccagatactactctaacatagagtaattgcataagcaaacattatacccgcaccaaagcatctcccagataagctagccgtatattcagtataacaagaacataatgtaaagtaggtactcatatactcagaaagtatttcaataccataaatgtatatagaagagtattctaataaaaatacaaagcttacaaaagagaagagaagagctactagagccatacccgaactcttctgaaggcttccggactcctgatttctactctactcctattccaccagctagatactactaaactaaacttgagagaaatgagagagctattgcttgaggtgtgtgttgaagtgaagagagtgaagttcttatataggctgccaatgacggttgtggcagttggaatggtcggaattgccctccaaccgtcattggggagtgatccatgccgtccagccaaaacctggatccaacggtaccaggggaggttcggtcaaaccaggggccggcccatcctggcccaaaatcggcaggtggcctcctgaacttctccactccgcagacttatgaattttggcccaattcaccgtgtcaattctgagttcttggcctattcatacataagtctggttctcgacatcgtccaattgatttatcgtctgagttgatgtcgattcttctccactttattgtcattctctacaaaaggttagtaaacctaatactagtggaatattattactctaacatatttatgcattgaaagcatcattagttctcctctattttggtcatattgacggttgaaactgatcgataacgaccatcaacaccaagttacttatagcctatgccatttgaagaagaatggtgacctgccatttgaaaaaaaagggagaaaacaattgaatgatacaatgtagcaagtaatgagtagatgcaaggcgtaataattaaatttgttgatatgttcaaattttgatgataatttagcaaactaccttaaattattaaaaaatgacataatacgagatcctcggggtcccaatgtgtcttagtcggctctgtgaatgcactaatccgaccaaaccatcttgggaccctaagcacctcccattctatgatggcttaaccaagatactaactacaaataacttactaataccataatctatgaaactatctcaaattatcaaaaaataatagattacaaggtgctgagtgaccctggttttcttagtctgttggcatatgcactaagagcaagttaaatagtatagccaactactggctctaagttatctatagttaatttaatagccaattcataaaatagttacctataaacatatactacactattaatatattgtcacatatgtcatacatatattgtgtcttgcagcctgtgatgtagctggctatagatctgtagcccgctgctcctctttatcctattttatctcctcgacgtgtgttcatagctggcttataatctgctattgtacctactctaatccaaccaaactaaccagaattgccggacgcctcgtattatgtgattatttgataaccatggacctaactataaataacttactaaatgtatattctagtaaactaacatgattatcgaaaaatgccagaatatgaggttctcggtgatccaaggtgtgttagttggttagtctatgcactaattcaaccatatcaacttagatcccaaaacacctcacatttttgtgatgatttcataaccaaggaactaactacaaataacttattaaatacatattttattaaactaccacatattatcaaaaaaaaagacagaatacgaggtgttgagtgatcccgggtctcttagtcggttagggatgcaataatccgaccaaaccaaccgatatcgccgagcaccacattttctatgattatgtgataacaaaggtactcttactaaatggatattctaataatcaacgtttaattatataaaaaagacagaatacgaggtgcttgatgatccaaggtgtatgcactatatccaaccaaatcaacttaggtcacggaacggctctcattctgtgattatttgataaacaaagaactaagtacaaatactctcactaagtaggtgattgcatatatgaaaataaattagattgtcttccacatcagtaaaatatacttgtatgttacataaaagaaaataacaaaaaatgtttagtttacagcaccacaactaacaattcgatcatctacttaagacgaaatgcacctttcttgttcatgatttcgctaaaattgaaagcaacgatttctcctctaatagcagggggttgatggggctaattttccagccggttcttaattgaataagattgaagttagtatgtattgagaaataatgtcagctttgatacaagagacgtgattatgagcacaaacctcgggctctgaatctgatggaaatgggatgccagatcttttatcaggtgaagataactatcgatttggtggaaacatgacacacgatccggcttccaatcaaaacgatccgaacccttcaatcgcaacatcacgactcctctggttaacaactatgcctaaacctgtttgacctcgccaagaaggctaatccatgcatgtgaatcgaagaacacaagcaagaacaagaaagacaacaactcacttgcagatgaataattaatcaagaactcaaagttggggttccacaaaccgaactagtggcgatggcagaaataatctaagaaaaaccacctctaaactatgacggctactgaataaatatgattagggacgtcctagggttagtcctaagccatccatcccttgggtttagcccacgacacaattaaaaggcccaaggcctaaatcagacttggacttgttttgcagattcccaatagctcggtaggaacttcacaaaatcccttttgttgtgatctgggttttcaacattacgtaacatttcagacagagtttgagggtctaaatctatggtattttttcctaatggagaagggacaaacatgccatcttgagttggatcgttccctacaacaggcacttcgttaactgcaacattcagtggctcttgctccccatgcctgctccagcaactataatgcttcctgaatcctctaggatcagatgagaatgtacccatgaactattagagaacatcttctcatttttatagtttgcagatggacacaacatacattcgctcatcctaattctcttatccttattcgcaacatttaggaatttagcaaccccatccctatactcttgggtccaatgatttattgtacatccaactttggtccatctacaatcaatcaaatgacaagtataagacacaatatgtaatatacgttatcaaataattttcatagtttttcttttacctccaatttccagcaaaaaatttgcccccttgccctctaccggaaatgttaatagtgcacaaggttgggatgtaaagcagttggtggttgggggtatttataggccacaagacacctctgacgggttagggtttgagcccaaactcacctttgtgaaacataaattagacagtgttgcacaacatttatcaagggcggttgatggtcagtatgttctccccctatttgctcaagcctatgaagaatacaaagtctttctggaagaggttactgaaatctcacttaatgcccaatctgatgtattgacttatgtctagggtaatgatagatattcttcacaaaaattttatactatatctttctttctggtctttacaaattccattaaccttgccctggatttggaggtgcaaaggttatatgaaaatcaaggtgtttgcatggctactgtttatggacagaacaaacactagagatctaacagagcaaaaacattgcagaccgcctcatgttcctctgacttgccctttttgcaacgctggacacagagaaacaagggagcatctgttctttcaatattcttttgctgatgcttgctggagatctattggttttctatgggatacatcaatggactttcatgatatggttcagcatcaaaagaattcttttggtgcacaatgttttaccctgtggaaacagagaaatgaacctcatcttccaaaatgtgcaaccttctctccctacatggaaggtcctcttgaaggaggaattaagtctacagttacttagacttaagatagttgatagaccttttcttcaatcatggcctgataatttgtaattaacatctcttgtacagtttttgctctgttcttcaattaaaattaccatgggggcatcctccgctgttttccggtcaaaaaaacatattcgtttcaagttctcatatttacttttgatttttttttagttttgcaaatgacctctcatgaagacatgttctatatatattaaaacaatacggatttactatatttgtagctttgtagctgaaagtttttatatatgacaccatttaggtgtctaaatattttttttacaatatctggtctcaatatttacaagttctttcgaaagtccaatcgttaaaaaattctaaaaacaattacattaagcttgattaaggtggaccaaagttttgtgcgattattacagtattttcttcaatacgactagttaatattttcttgaaatattattttcagtatggtcattgactaaaatatatcatctcgtatagagactcatgacataagtgaaaaatcatgttaaaagaggtattataacaaaaaatggaccaaaacatatcattttaaagagaatattgtaagactcaccttaattggatttaaaatgaattttatattttaaaaaatatagtcatttttgaagaataggaaaaaaaacttttgtaagcggacttcttaacaaaccacccttaaaatgatttttacagttgaacttcttaaagagctgctcttaaactaatttttatggatagttttcataaggaaaccatataaaaatcgattcacgcagacttattaagtgatccacccatgaaaatgggtgcatcactaaaaacataaaaaaatcataactctttcagatgaagttgggtaataacaaactttatatgaaaattgtagctctcgatcacatctagaactttgtcgtagaatgtttttttatttgagatcgtttacaaaatattatatgcttcaatatgaacttttgagtttttcaaatgagctcggatggagatatgctatatatcaaagttgtataactcgacaaaatctgcaagtttatagatgatgaatttttcatttaagattatgtagagtgtaaaatatctctcttagtctctcccgaactgtcccgtatgtccccttcaacaaagctgctttctctccgccccctcttcctcctctccgacagtaggtggccggcaaagggtgggagaggggttcggccttgctcctctagtagtagtagtctagtaggtttagttgggttctttcgtttgtctgggttattctattagcttttacccttgggttcttgaggtggtcatcgacgtttgtgttatggggcttgttgttggatttgctcatgccagcaagcctcagagttcagtgacaatggtgtcccacctgctagctgggatgcttccacgtctgcacaaggagaagttgggtcggccttcaccaacatctctggcaagctcgttccaagggtagaggccttcttcatgagcgccggcgattgttcttcatgtggcggctaatgctattgagtcaagccaagctttcctcaacctcccatgcatggaggtccctttcaggtatggtcttcggtttctaatgcaatattctatgcttcgccgatgctatggatttgagctagctaaatctttggaactgctgttgttgcctccttctttggcatatgatttgttgaaaatctactgtggtgtggctgaaagtttgatttgtataccatcgcctgaacatccaaatgtgtaaggccctttttggattgtttggtggttgaatcataattatgcagctaagttagtttcaaactatgccggattcaagctctaggacttcattgttgatgctacaaacagttgaaggactccattacttcttatcaactctttctaaatctatttctacaaaatgtagctcaaatcgcacaagaaaaataatggaaggggtggtgattttacatcagactatccacgagttgcacaagaaaattatgaatggggttattttcaaaaaaaaagttttgaaaaggcttatgataaagtcaaatggccattcctccaacaaacactacgcatgaagggattttctcagtagtggtgtcatcggatttctaaaaagatttgaagggggaagtgtctgtctaaaagtcaatgatgacttgggtaataattttcaaacacacgaaggcctgcgacaaggggatccaatgtcgcctatacttttcaatattgtggttgatatgttagaggttctcattgagagaactaaaggcgatggtcaaattagaggagtcattccacatttagtggaggatggtttgtccattctacaatatgctgatgatacaataatttttctagatcatgaccttgaacatgccaaaaacatgaaggccatcatgtgtgtgttcgaacaactctcagggctgaaaataaactttcataaaagtggtttttttgcattggaaaagccaaggaagtagaggatcaatatagacaactatttggttataattctggatctttcccctttagatatcttggtattcccattcattatcgaaaactccagaatgttgattggaaaggagttgaagatagatttgagaggaaacttagcacatggaagggcaaaaacatatcatacgtgggagattggtccttctaaactcagttctttcgagccttcccctgtttatgttatccttctttgaacgttcacgaggtgtgcttaaaagattggattactttaggtcacattttttttggagtaatgatgattggaaaagaaaatatagactaactaagtgggaaaacacatgccggccaaaaaatcaaggtggactaggtgtccctaaccctgatatcaaaaatagctgcttattatgcaaatggcttttccagttgcttaatggtgaaggtgtatggcaagaacttttgcgtaataaatacttcaagggtaaacctctctctagtatgtccagcaagatatgtatttcttagttctgggccggtttaatgaaagtcaaagaccaatttcttacgtttgggtcttttacatgtggcaatgggacagacataagattttagaaagacatgtggttgggattgcgtgctttcaaatatcaataccctactttatataatgtggctcgaaagaagcagtctgctgtggcagaggttatgagcacaacccgctaaatatctcttttaggagagccattgttggccaaaagctaattgagtggaacgatttgatcctcaggctagctaatataactctagctaatgaagcggactactttgtatggtcgctccataagaatggccaattttcaatccaatctatgtatatcgcgaacatgaactctaatgttcggatcgaaaagagagttctatgggacttaaagattccactaaagatcaaggtatttttgtagttaattcacaagaaagtacttctaacgaaagataacctggctaaaagaaaattttttgagggtggggggcacaagagacaatccaacatcttttctttgaatgccatgttgctcagtttgtttggagatgtgtgttttttgcttttaatatccctccaccccgtaacttcaaaaatatttttggtaattgccttagaggggtatctaggtctattaaaaagatgattctaattggagctagtgttgtatgttgatcaatttggtatttgttgtcatgataatgtttttaatggtaaacaattatctaaccctatgcaggttatcttcatgttttcctattggttccacttttggtctacgatgctaccacaggaggagtatgatactatgcgcaatggtgctatgctcttggtatcgacagccgagggtctcttattgaactatgggtggcgtagttcaattagaattgctagctaaaaaatcatgtggtttaatgctagtcaatactaaaggggagttggggaattgtcccatcaccttatttcccattttgatttatttttatctttacctttttctattaaactttagactccatcacctcctcccccaccccatcctcaccacgcgctcccccacccacccatgcgtccccaactgagacgactgcaatggagacggtgacccaacggtacaggtagcgaatccaaccgccagagggccatgggcggtggattcgatcgcgagagatgcatggccggcagatccggtagccggacatccacgggaagcgagaggggcgcagacagcggattcggcgtggggagagtgtgggcttcgatggcaggtgtggtggtcgcgtgcgtgggctttggctcgggcgtgggcttcggcgggcggcaatgacggcggccacgatggttgcacgtgctagcttcaggacgggcgtgggcttcggccggcggcgacgatgacggccatggtggtcgtggtgacgtctgcagtgagttccatagcttgggccttggctgcagtgaaatcggctccctccctcgccaacggcagcttgataacggcaacggagacacctacgattagggatttgggacaatgatttttaatttgtgattctctgtggactattttcgacctggattttcaaacaaaaattttgattgaaaaattattttcgttggcgggtatcttagcattcctagcttggccgctagcgaaaatcgttttacactagcgaacgtcttagcatggccgctagcgaaaatcgattttcgctgacggccgatagctctcatcacaaatgtatttttttcactggccttaggctgctggtttcacaactggttgttagcgaaaacccattttggctgtcagcgaaaactattttttatagtgaatcctgcattttttttctatttcggatctgaaatattggttgtatgatgagtgcatgtaggcaggagccatagaagtttcaggtgtcctattctgcatcccttagactgaagaaaatgcttagattcctatatacttccatcgtttcaatttaagtgcagtcatgggttttcttgtccaacgtttgaccgtccgtttttttaaaaattatataaaaaaaattgaaaaatagtcacacataaaatattatttatgttttatcatctaataacaataaaaatagtaatcattaattttttcaaataagacggacagtcaaacgttgaacatgaacggtataaaactgcattcttttttgacagggtagtacatgtattcagaataaattacgcttatattatcaagttcaattgaaagttaattgagcaaatcgaccattaatttatgcaaaaacgggtcttagtagtacacaactgatcgatagtaggatgcacgcatattaaatttatttatataaataaataaataaatatatatatatatatatatatagggtgagactattctacatccggggtgtagaataactattctatacccctccccaagagcccaacccacctcccccttcttttattgggctcaaaacccacctctcaccccagtcaaagcatggtcaaaggaatgtcagatcgcggccacgtcggttaaacccgtgtgctaacttcctcccacgtccacctatttgttgtccttgtctcgtacgaacggtgcagtaacatgacgaccaccatgcagtaaggttgtaccttacttgcagtaacactaataaaatatagttaaaatatagtcatgacggatctagttttgtagagcactttttttaaagcattacggtgcaaacggttcaaaaatataatatgtgatgtgagagatattattgtttaaagatgtgaattcaaaatatatcacttgcacttatattttactagttcaaagtggatggtaggtcctgtacctgtgtttggttgttaccacctgttattgcagtaacgctattaagaaattgcagtaacatgcactgttagtaacgtcatgatggaatggtagtaatacacaataaaaagtagtaacgataatgatttagtattactacttatggagagataaatttcaaaagaccaatcttcgagaagaaatagtagtaacacactcaaacactcgattactgtaaaagcacataaactgttaaaagctaagtagaagagaaatatatatgttattacaaaactcataacaagttactattagtagtaacattatcgtataagtatagtaacacgtcacattactgcaaaacatataggatgttactgcacttttgatagtaacatcgtggtgaaattgtagtaaactaggaatcgaaacaaaaatatatgagttagaagtctacatgctaaccatatatttgttactgcataaaaatgtaagtgttactgcatggcagatacacgttaccacaagtgtatgcagtaacactattcaagaattgcagtaagacgctttgttactgcaaaacttataatatttaccacactttcataataatgttatgatgggattgtagtaatgtacaatagatagtaataacacttgtggatagttaaatttcaaaagaccaatctttgaaggttctctctactcttgccccataagtaaaccgagccaattcatctctctctccatgtcactgcacctttttttcgtactatacatattcttgcagtaacgttatcaagtaatcgcagtaacacactatgttacaataaaacttataatcgttactacatcttgtagtaacgatattatatgattgcagtaacgcataggagatcagcaataatacttatgatatagtattactgctcgtggagagccaaatttttaaaaaaccaatctttgaagggtaatatctctcacatcatgtactacttttaaaaaccatttgcaccatgatgttagaaaaaattgcttatcaaaagtagatctgtcatgattatattatgactacatttcaatattgttacagcaagtaagacatggtgttactgcacgaagaacatcgcgttactacgttgttctgagacgagagctgagaaaattggaggtggtggggaaagtgaagggcgggtttgaccgagatgggggagctttgaccgaggtgtggggtgggttttgccccctggagtgagggtaggtgggttggagggagggaatatagaatagttattctataccagatgtagaatagtttatatatatatatatatatatatatatatatatatatatatatatatatatatatatatatatattctctctcttatctgtgtgatgcacgaaacaacgctaacgtaggaatgaaacaggcaaaagcacgaggtaaaaggagtgacaaagcatttgattataagtttggttaggaacttaattaggatgatgtggtggtagtggatgatgggcacaactctcgaggatataacaagtgtactatataccgctataaactggataatgtggcacacttgtagacaaaaggcaaacattaggacatgatttttttacttctatacgtccagatgtatgaacccactcttaaatatgatgtgtcttcgataggaaattaactaattgtgctgcttgatgacctggtcagctaattttaaattaagatatagacagcgatccggataccatcgcatttccttgcaaaaggagataatagtaatcacctgaagttctctataccctgcaattcccaagataacacgcatatattttatgactagcgacttcatcgttgatgattacctatttaaccaataaacatgtacttgcgtctcaacccgtgaaaatagagtattaactagctgaacttcaggtatagtgaacttaatcactaatacattatatctggttttccattgtgtgcattgctttgtttagcggcatgcatatgcatgaattcttcaaattaaaggcaaaattaaatagtacaaactcgttattgaggaaaaccttttgtcgatttgtgtgtagatgacttttgtttctaaactactcctccatccacaatagttacacctatttgatattttattttttccaaataagttcctatttataatctctatgcatcgaagatttaaatggatgtaaattaaatgttttatcagaattcaaagagtcatcttaatactcattgactactccttcatccacaatagttacacctatttgatattttagtttttccaaattagttcctatttataatctctatgcatcgaagatttaaatggatgtaaattaaatgttttatcagaatccaaagagtcatcttaatactcattggttgcatgcatggatacacttcttggatctttgttatattcaagatgagttaatttcttcttgatcttagggacaaaagtaacaagtgtaactcctatggaaggaggtagtaattaaaaaaactgtccatggtgtttcaaaaggtgtgaagcatgcttggtaatgtttggaatacatgaattttgtaggaatttacaaaagaagacattagtaattgaaagtaggactcatatgctgaaaagcatgttaagcaactaaaggtgcatatatctcaaatttcataatctgagcgcagattgttgcatacttaaattgcgtcatttgtctttctttacgtcatgtatatatgatctaataaaatttcttgatagatagaagtgttgtttcgctcatccatgtgagaggatttagttgatcgaaataatatttcatatcgttcaaaaattgctggttgcagctgattagctacgtactggtggcgtatgttgctgtcctaatgtcatacgtttactactacttcctgcgtttcataatgtaagtcattctagcatttctcacattcatattaatgttaataaatccagatagataaatatgtctagattcattaacatcaatatgaatgtgggaaatgctaaaatgacttatattgtgaaacggagggagtagtatatatgtatgcattaatattgactggaaagctcccaaactttgatgagttcaatgaacacaggcgtctcgtgcctacagcttaaataagcaaaagagttaccttactctgtaacactactataaacatgtataagttgaaaataacacgtgagaataggccagcgtgtcagtgacacgcatagctagattttatggtatctaaaaaatctctcgcaagttttttgggttaaaaactttcaaatgtaactatatagtataattgaagtgtaattacattataactacattataactactatgtaattacactgtaactatgatataacttattaaaacttgcattcaacaacgctttggttagatagcactaggatcttacatatgacacgtgtgaaaaatttcattctagcaattttttctcttcatgcacgaatctaaaagttttgggggcaaaaaaaaactcatgaaagttttctagcaaatcgtatgtatattttcatgtgtcgcaaaaatgtactccctccgtttcagattataagttattctggcgttggtaaaagtcaaactattttaagtttgatcaaatttgtagaaaaaagttgtaacattttaacccctagacaaatatattataaaaatatattcaattatatagatttaatggaactaattttgtgttataaatattattatatttgttaatttacaaacttgattcattcaacttagagtagtttgacattgattaaagacaaaatgatttataatctgaaacggagggagtataagtttaactcatctgatcgttacagagtatatatgcatggtaaactgattttaagtgcccttaaaattttaataaacccctcggaactgaatacttctcaattcgctgcccattttgtttgaatgtttagactctcgcgacatttggctgtcgataaaaacctatatatagccacatacttggtcatcgtcgtgttcgtcttacgtaatcacagtcaagcttacgccgctatatatatattaccctcattcatggattaaacgaatacggcaggcagcatatgcaataggctactagtctgttggaggatcttctagcagttacggattctcccagatgctctaaacagttaatgccactcaaattttgagattctatgtctaggagataatctactatataccactgatcttgtacgagttcaacaatttactatcaacattgtctctttctataatatacgtgtggctttatcaattgttatataatacgccatttggttgggccttcttttcaaaaatacccaaaatacctcatggacatacaaggttaacaattgatttatctcattagaagtttcaaaaaatatgaaaacttttatgtgtccttcttacccaacgtggaaatttgtatagaagtttcaagatttgtatatttctatcttttaaaaagaataaaacttatatgctatatgctatataaaatactttttattattgtttttaatgtaaatcatctttcatagactgcataagttatttatgtgctattacctcttatggctgtgttcgcaaatgtcggttcccatcgcaaacagtacgcacgaaaaacagagcggtctattagcacgtgaatatcttttttcaaaaatggattaatatgatttttttaagcaactttcgtatagaagcttttttgaaaaaaaaacgcaccgtttaacagtttgaaaaacgtgcgcacggaaaacgaagcaatggagttgggatcttggagttccgaacacaccctatataagcaaattctctctcatttaccgcataaaaataaattttaaaaaactaaatataccaaaaaaaacttgaaccttgtatacaaactttcatgttgtgtaagaaggccacataaaaattttcatatttttttaaaacttcaaacaagataaatcaattattaattttatatatctttaagggtattttgggtatttttaaaaggaaggttcaacccaatggcgtattatataacaattgataaagtcaccaatatattatagaaagagacaatgtcgatggtaaatcgttgatttcgaacaaactctgcagtatagaatagattctctctatatatagctatagaatataaaagatatacattcaaaagctgagaaatctagtttttttcaaattttcataaaatggctaacaacaaattacttcctaaagtgttaaactaactcctctaaatacgacctatacctttcgtaccgtaagtgtcatctcagcgtggacatattataatctgacacattgtcgatcctgaggagagagacgtcgaggacgacgactcgcccgcgcgcgtagtaattagctatactaattaacagctagggcctacctaagctgcgcactaaccacggaattaagaaaagtaaaccggtctggtcggcataagtatacattaactggcttgggctttcagtcccggccaatcagacagcgatacggcggccaatggcaagtgaggctttcgggatggatgagtagcagtagtgggaggccacaccgatggccgcaaggttggagccagggagacgttcgaacgatggccaacctgattagagagctgtgacctccatgattaattagttagggttagactccccagaaccagcctgtccgaaaagctaatttaaggcactgcctgttgggtggctggaccaggcaggcgctgcatacccggcacgacaaacctcgcaggcaacaactccagttttctgctcttggatgcccacaagaagttaagcatctatcatagcatccatgccggatagagttagctacgtactactacttctagcactgtgtcgattgatggatggatcattaacctttcttccaagggaccagcagctagccagacgccagttccttcttcctggaatatccctgccaaagcatgagctgctgtgctgctagtcactttcatgccggccggcctgctgttatgattagtaccaagcggtttttggttggttataccgacacacacacacacacacaccatatatgtaaatccatgcagggtgttgtaaggatggaggaggcacaattatgtcgttaggccttgtcactttcatgcatcctcttgaagactattattctggtgtaaggttaatcatgcatgcatatactatatccaaattaggatgaaatatatagcaaggaaactagggatctcttacgaggaaaacatataggaaatcattgttgcggtgtgtgcaggtggacttagacctcatgttcggcctttctatgacaatcacttccttctgacgctgctagtcttattggaaatgcacaagaactgatccattcattacttatcattgtggacatatatgtacttgtacttaatcgtcactgacacgacggatatatgtacttgttgcgcgctagctgtgattaccgaagaagacggccaacagttggaaacattgcaggtcacatcgtgcccaaaacaccgagtcaacacagcatctctgaaggaaccacacaacttgagatgatgtgatatttgagagcaacgtacaagtacacacaattgagaattgagattacgcatctggtgacacacacatataacttgagacatgtgatgattgggaacaacttttgatcactacacatccatatatacgaaacaatttttgtggggagcgcacaaatccaagagggggagatgaaaaggagtagctagctagctagtctagttagatgccctagaatcaagcagctgagaagttggtggttgacatgagaagtgccttgcctccctcctcctcccttgctttgttcgttcggcgtctctctctccgcattttctgtgtctggtgaggggtagtagcggtggtggtggtggcgtccctctcctcctccctcccacctatcattattctaatcaagcggcaaagtggagaagagaattggccagaccaagccaggcagggtgccgtctttctttcccatcttttcccctcttccctctctcatcgcgcagcacaacacacaccaccacaccacaccagtagtagagcaccatgcatcctccttagctttcctccccttccatcctcctctccccctttgctttcctcgcgactgttccatctcgtaggtttcgtctcttcgtcggccccttccttcccacttgagacttgagagagatttgttcctagataagatagaggccaaataaaaaagatcttggaggaaaaagaaagcaagtgagtggagtgaaagagagagaggaagagcaagagggataacctagctaattgattgctagcttgcaaggatggatccggtcacggcatcaatacacggtcaccatcttcctccaccgttcaacacccgcgacttccatcaccatctccagcagcagcagcaccagctgcatctcaagaccgaggatgaccaaggcggcggcactccgggtgtcttcggcagccgcggcaccaagcgcgaccacgacgacgacgagaacagtggcaacggccatggaagcggtggtgacggcggtgacctcgcgctggtacccccctcgggtggcgggccggacggcgccgggagcgagagcgccacgcgccgcccgaggggacgcccggcggggtccaagaacaagccgaagccaccgatcatcatcaccagggacagcgccaacacgctccggacgcacgtcatggaggtggccggcggctgcgacatctccgagagcatcaccacgttcgcgcgacgccggcagcgcggggtttgcgtgctcagcggcgccggcaccgtcactaacgtcacgctgcggcagcccgcatcgcagggagcggtcgttgcgctccacggccggttcgagatactctccctctccggctccttcctcccgccgcccgccccgccggaggccacggggctcaccgtctacctggccggaggccagggccaggtcgtgggcggcagcgtcgtcggcgcgctgaccgcggctgggcctgtggtgataatggcggcgtcttttgcgaacgcggtgtacgagcggctgccgttggaggacgacgagctactggcggctcaagggcaagccgacagcgctgggttgctcgccgcggggcagcaagcggcgcagctcgccggcggggccgtcgatccaagcctcttccaaggactaccaccaaacctactcggaaacgtgcagctgccgccggaagccgcctacggatggaaccctggagccggcggtggccgcccggcgccgttctgagatggatcgattccgcgacagcaacgcagcatagaaaggttaagtgctttaattagctttctcttcacttggagttggagactactctttcttggaggatttccgtgggaattatgcatgtgatttcaggtgttattaatcgttattatgtcagcgtcggggattaattgtttcgtgatatgtagctctctctctctctctctctgtctctgtctttttttcggctatttcttgtgtcttcctcttaactgatctcgctgttgactcgagaagcttgtactaccttatattgatctttctttcagctctgtagcttaattatattcgtttcgagctagttgtttgtagctttggccgttaaaaagactgccacattgttcccttgatcgacagatcgatcaactaacaattgatgaggagtgagagagaaacaaaggaaggaaggggggagacaggataaaatgatgagagaaggggaacatatggaaagatgcgtgtacttttacccgggcctgcagagagcaaatttctcttacttccaagccttggaagtgaaggtttgatcggtacgagaagtgcctgtgccctgactgacaccatcaccacggccaccagccagccaccaccatcatcatcgcatgctccaattcctgccatttcttcttcccacactcccatggacactgactccgagaataactgaaacactggccaattgccaccattatgttctacaggccaagtcgtagcatcattagcacacgtacattacgcattgtatctcttaatttataccgttgctagctgctgttctctgctactacatctcgctgcttcactgtattcattcacacactactacactgctactaaaatagtcaccgccaagtcaaatggtgatgccaatcagggccatgcccaataactagcccatgcgtgagagagctgagagcctgagactggaacaaatattttatttgtgctctctagcttgcttctgggtctccttgttgggatagctatgaacgagagatcagcacgttgcaaagagagggtcatggagtggtagtcgtaccttttcgaggcaaactgccagatcttaatgattctgcaacgccaacacaaagaagcacacgaggtgttagatctggctctatttgatgccaggctatatcatgttgttcgcctgctgcgtctggttaatatctaagatgaagactgttgggtgtgttttcctgtttcatgccttttctcaccgtagtttgctatttcaattaatttcaccgactagcttgacgagctgtacaattaacatttcgatgcatgatagtaatgattaatgaatgctattaattatcatttattcttccagtgctctttagagtgctgattttacaatccttgagaggtatattatgtgttactttcacaacgtaagactttctagcattgcccacattcatttagatgttaatgaatctagacacatacatatgtctagattcattaacatatatatgtatgtgtgcaatgctagaaagtcttacattatgaaacggaaggaatacattaactttctttgtctttttttttaaaaaaaaatattgtttccatggttctgtgcacttccaaaaatctatttctcactgaaaaggtaagatataataagagaaataatgtcaaatgttttactgaccaaggccatataatgtaatcatatccagtttcaagctagcgtcgttgcaagaccccatctagtcataatatttgacgtttaggataaaaagtagtcaaaaattttgaaatcaaactttggtagtcaattttgtgtcaaataagttcataaaacaataattttatgatattataattattcttttccacgcaaatctatacataccacatattttcctttaaaactaagtatttgagaagcttttgatgttcaaagttataaaatataatcaaatcttgtcttaagcataaaatattaagtaacgtttaaaaaagtaatgaactttttaaatatgcgtccttcggtgaactacttgttgaaatattcttgagtaattaacttcatatgtgaacctgtacaccactatctagactagaaaagaggtgcaattacagttctttctaagtcaaaattggctagtctggacaaaaagaaaacctataccttagttatgtgtgtgtacaatctgcatgttagtatattcaatcatatttttctactattttttttgctatgttgtatctataattgacggatttttattcaattacaagattccgggattttcttggcgccacctgattttttcgttggtcaaaaaatagccgtcaaggttacatttattggcttttcgaaagtttgatatccttcatagttttcttggcagttagaccaccaataaaactttccctcacggttagcagccaagaaatctgaatttccctatcactctagacttggcgttcggccatcaaaatatattgccttggcagtttttggcagccaagaaaattctggattcttgtagtaattaccttttcgttaaatcgtgaatacagataaatatatgattttaatattaaattttctaggttaaaggtccatatatccctaaactttggataggagttcgtctaagctagcacactaaaactttaaaaccacacacctaaccacctaaacttttcaaaaccatttatattgctccctaaggtggttttgtgtatttggaagtttgcatgctgagaggttttaaattattaatatagcatgtttacatatcatcaatcactggtcactcatttatactctattgtaatgtcatacaagtatgtattgacattcctttgtaagtgagagcaaaaaatagagtaaaaatgaaacatttagatggagattttagcatatatgtccaattcatatgtcacttagtcaaacccacccaacataaatgcaaattaggtaaagatcactttgcgaaaaccaccttatagagtaatatgaacgatattgtacaatttaaggtgtatatataaagttcagtctgctagatggacttccaatcaaagtttaggagggtatttagaatttttcttttatatatatattctgcattagaaataatctcctgaatattgtgttgtacgtattgaagaatatactagaatttctgtgtaggtagttaattaactaattgcacgactatttatataattgtctatgtgccatatatatgacaaaagtgttttttatgtgtgttgtatgacaaaagtatgttttcagttattttaaaaaaaaagtgtagttgttactagccagatgttcatatttttgtccactatctttgtatgttcatatttttatgattaattccttctgtgtactatctatgtaaaattaggtgttcattcactgtttttaatatccaacggaaagattccatttcgatagttcctcaataatgtgtccgtacgtgtgtgaactggtattgcagctagcgtgcattatatagcagcatattttgtttaagagatcaggggtcaactcttggcttaattaacacacatgaatacttgcaggtgttcctaaacttctaaataaaagtatcttcaccctatatgtttcatggtatctactggtataataactatttcagcaactaaataaataaagacagaagactttagataaccaactagtttggttcatacaacgtacatgcaattcgtgcagcccgttttctccgatcccgtggatggctggggatgaataaaatcattgaaccattgctgcccccctccttgacaggggcatgtggttgccgatcgaaggaggggattttctggtggccaagaaaggttatgggcatggtgtgctctggacacatggcttcctcaaatcggcacaacaagtaggcggcaaccttgtcacgcccagaaattcactaataatttccgaacttatttgtacataaaatcatcatccagaaatcagccgaggtacataaacagacaatttaatatacaaatccatcttaataataacgttacatacttacaaaagaaaagaaaacagcagcggaattaactgtctagcgatggcttcagctccactcccacaggcagctcaactggggtataaaccaaacgtcttctccttctggatcatttttcttcaactgaggttgattgattattgcaaaaatgagcatatgacatactcaacaagccacacagcaaatatgcaagtgtacaaggataccaaaggatggcataatataggctcatttgcaaaagcagcatttagcaaatatttaagaatagtaaaacagtagagtaatcatcaattttaatcaacactgaacagcacacccatgctgctcaggcctaaccattctgaacaaccaaacccgactgcacagatctaactccaaaccaggagctaagcaaattattaccaattatagcatcaataattattgtgagaggtataagactaatcacgaaaaacattgctcaacccgcccatgaccgtgggtacggctattcgaatagttttactctggccagaggtgtaccactgtacccacaagacacagcctcaacatcatgtctaccatgcgtcgcgatactgaaaagtacccgaatagaggctgtgacaataccctctgcacaacacaactcaccacagtgcaccattcctagatcataatcacccactctataaatataaccagaggcatggactccccagcgatcctcaccgacttctcgccgcttctcagtctggcaccccgcaatgaatcatgctatacaaaaggtaaagccattgcccacgctggcttgtggttggtacggttaatgtctcacaacagtcaactcgaaaacgaatccaaattcgcgtcgaattcaaagggataaaaccggatttttgggggaaaagatagaggaggctaagggaaacaaatcccctcaactaattttaggaatgcacgagagataaggccggatttggaggagaaaatcgacggcaatggcggcatcgggctctgtctccagccggctggaggttgaagatgccactgtagcgacagggaggaaaactagacttccggctgggcttctacttcttggcccgattgaaagagggacacaaagcagacttcgacagaaagagggggaggggctacaggctgagaggagattgggccaagaaagagagaggacttttcctgtttcggcccgaaaaggaaaagaggaattttaattacttttccaattaaattaatcactgaaatgatctttgaattgttaaaaatacttctaatgctcaaataatttcaagaaaaatcctgaaaatacttggacacccaaggtacttaacaagattataatcagaccatttaatgattaatttaatatgtagataattactaaaatgttgtttgtatgattaaaattaggaatagagctcagaaaaatccgagaaaattccagagagtataattaaccgtggagaatttaataaaaattaaatccatccatgatttatatttagaaaattttatttctcacatttaacttcacttgtaaattaatgaatatttaatataaattctaataataatttataaatcctaaaacaaaaatcaggtcgtgacaaacctacaagtcgctttcactatcatttagcaaaaccgtgcggacgggggagtggtagctaggcctgttcaatgtcaggccaggcccaagcaaacaaatcaagccaagtctgagagcagcccgaatcatgtaagatcagaattttgctctttttattgttattacaaataaaacatataaaaatacgtaattaccaacactggggcaggcttcagatcaacgggtcaaggcagcgctagctatcagaaaccatcgcaggtgcaccggtatctattggtctacaccattacaagcagctggcacctatatatgtgaaaaatagaaccagcacctttaccttcgctcaagcaaaaaaaaaagccgattattgtaggatcgaatcacaagaattaagccaactagagggggataaatggttggtatacccaaaaaccgaaaacttttagcggaaataaaagttaccctcgaaatcgacggaagtcggtctgaccgagattgatctgcaggtctgaccgagtggatgccgccggtctgaccggtgttgaatcttcggtctgaccaccgaagtcgcctgccgcgcttgtcgctgccgccggtctgaccgcccgtatgccgccggtctgaccgccggtgagttgccggttagaccgccgaaactcggtgaaacacaaatcgaagaactcttaaagtagatgacgactttattgattctctctgtgtttacaaagtgcaccaacagtactccttacaaaaatttcgactaaactcgaaaccctaactcaaaactcaattcaattgctctctaaagcgataccgggaagcctcacgctccccctctatttatacccgaggtaggcagcctaaagccacgaaccaaactcatactaagagtcctaaacaccttaggaaaccctctagtacaagaaaactttacataaccaatcgtaccaaatttggactccttccaaattcgactctgcatcccatacgcacacaatacctccatcgtatgccatatggaatgtccatcaaccacgtgcatcaactctagcctaagtatcccgcatgatctctgaccactacggacgtcgtcttatccgcaagccgactcccggtccatcaccgcaaatactctcccgagacatcgagtcacctacacatgaaataaataaagaaaccatattccgagaccaagctatatccaatttgactcattagtagcaaacaacagtattacatacgtatagtatccatctagaagtcataatcatgaaataatcacggatatccaaataaacaacccgaaaccgaaaccgacacagcgtcggccggtcagaccgtgggctggccgatccgaccgctcgatcaccgccggtctgacaggcatacacagcccggtttgaccggtcacataaaatgatagaatcctacgatcacctgtgaatccaatcatctccaaaaccacttcgtgaataaattccaaataacaaaaccaatgatctccaatgcccaattgttcatcacagaataataatcaaaaacacctttgattttacaatctcctccttgatgaacacattggcaaacccgtcaaaaatgttttggtgtttggaaaaataaaaaacacaagtggtaaaaaacacacttcatacaaacgtacacatcgtgctcgaaaatccaaaagaaaacttctccccctttttaaaagaaagaaattcccaattgaaccaaaaacatgctcttctcaacagctcttctcaacaactcttcaaaaattcaccttgcttctccaaaaatccaaaaaaatttcacattacttctcccccttttgacaatgatttcatcaagcataggaattatgttcattaatgttcaagagcttagcatacatatagcatatcatgtcatgtgttgcaataaaaagaagatgaacccatctataacagaacaagcatgtattaaagtataaccatgaaccaaagatttgacaattaagcttgaatcaacaatcaaaattcatgatttcatacgatttataatacaacatcttaacaagcacataggttgaagaataaacactaaacacatatacctattgcatttatcactctttctcaaataacctttagcacaaaataaccaagagaatttttttcaattttttcttttcttgagcctttttgctcatatttttctattttattccgggtacgtccctatcgtcaagactgtttacagtgattcggcacccattattttgctcacatcgaatacatccttgtcgtcaagactttttccaaggattcggtattcattttttttatatttttattctcttttcgcaatgagcaattaaagctatttgaggaataacaattcaataaagcatatatatagagcatttataaatcaaaccatatgctagcatcaacattgcatattttcttaattcaagtatagaaattaaatgtcatgcatcatctcccttaaaagcaaaatctaaatgtcatgaaaagactagaatacatacaagctatgctagagacaaataaaccttcaaagtattgctagcatgcacaagaaaataccatatgcataaacaaagctctctttactcaatttttctcattgtcatattattgcttgataaaaccatgaggtacaaactccccctcaaaccatgccaataggatgaattatgcccaattcaccacgaagaaaagcaaagcgattagaatccaaaggtttagtgaaaatatcagcaatttgcaacttggtgtccaaaaactgcaattcaacatctcgcttctcaacatgatccctcaaaaagtgaaaacgaatatcaatgtgctttgtgcgtgagtgttgaacaagattcttagcaatattgatagcactagtattatcagaaaagagaggtactttctcaaaagtaaaaccataacctttcaaagtagataaaagccaaagaatctgtgaacaacaactagcagcagcaagatattcagattcagtagttgattgagcaacactagattgtttcctagaagaccatgcaatcaatgatgtaccaagaaaatgacatgttccactagtatttttcctatcaattctacaaccaccaaaatcagcatcggaatatccacttaagcatatagaagatgaagtagaataccaaaatccaaactcaagtgtatgattcaaatacctcattattcgcttgaccgcttgacgatgtgaagcacgaggagaagcttgaaagcgtgtacacaaacacacagcaaattgtatgtctggcctagaagcagttagatacaacaaagatccaatcatacttctatactccttttgatcaacagcttcaccatcttcatcaggatccaacacagctgtagaaccaattggtgttgaaattggcttgcaattatccatcttgaaccgtctcaaaagatcctttgtgtacttcgtttgatgcacaaatgtaccttaaggtgtttgcttaattagcaatcccaaaaagtacgataactcacccatcatgctcatctcaaattccctgcgcatagtctcagcaaactccacaaccaaaacgtgagtcgaacaaccaaagatgatatcatccacataaatctgaacaaaaagttgattatcaccttgcttaagaacaaaaagcgttttgtcaacctttcccattgtaaaacctttcgcaagcaaaaagttcttaagcctatcataccatgccctaggagcttgtttcaatccatacaaagctttagataatttaaaaacatggttgggaaaatcaggattttcaaaacctggtggttgtttgacatcaacttcctcctatataaaaccatttagaaaagcacttttcacatccatttgatacaatttaaaaccttttgaagcagcaaaagccaacaaaagtctaattgcctcaattctagcaacaggagcaaaagtttcattaaaatccaaaccctcaacttgagtagaaccttgagcaacaagtctagctttatttctcacaatcaaaccatcctcattttgtttatttttgaaaacccacttggttccaataatattatgtccagaaggtggttcaactaaagtccaaactttgtttctctcaaaattttcaagttcttcatgcatggcattaatccatgattcatcagttaatgcatgtgacatatctttgggttcaaatgaagcaagaaatgcagaatttgcacaaacatcatgagtcgttaccttagaccttgtagtccgctcacctatattaccaataatttgttccggcgtatgtcgtcgttgaatgtgcaaaggagccgcgacttctaaagttgatccacgttctgtatcagtactggtcgaagtagtaatttctggaggaccatcctgaacagcatcaacagaaccctcagctgacgaccctggccggtctgaccgcacctcctgtgctggtctgaccggaggtgtgccggcggtctgaccggccgagccgacctcattgtcgtcgttgtcgtcgctctcgtcttcaaaaatacgaccatcctccccctgaacctgtgacagtgtacctgcaatatcgggtctagtacctagactagccttatcaaaagaaacttcgcaagtctccacgattttgttagtccccaaaataagtacacgatagccacgagtatgtgcggggtaaccaagaaacaatccatcggtagaacgtgcctcaaacttatccaaatttccagatttcaagacaaagcacttgcaaccaaaaacacgcaaatgtgaaactttgggttcatgtccaaatcaaagttcgtaagaagtttttccaagttttgatctcaagaaaactcgatttgaaatataataagcagtgtttatcgcctcagcccaaaattttctaggagttttatactcatccaacatcgttctagccatctctctttcgttgcaaaattgttcaaaagaagcatttttaaacttaccaccattatcacttcgaattcttttcaaagaaccaggaaattcaagatccaatcgaagaaacaaaccacgaaagtgttgaaaagcttcgtccttagttgccataaagaaaacccaagaatatcgagaaaaatcgtcaacaataaccaacacattccactttcctccaacagattgcactctagctggaccaacagtgtccatgtgtaatagctgtcctggtgcatccgtcatcacagaaacaataggagcatgtgaagaagcaaccatcttagcatgacgacacggtgtacaaaccaaatcaagatctttcttaagtttaggcaaaccacgaacaagatccaaaccacttaacctagtgagatgatcaaaaccaacatatccaagtctacgatgccaaaacatcacatttttatcaaacttagcaaccaaacatgttatcgcaggtgaaacaggattttcaaaatctgatttaaacactcttccatagcgagaaatattcaacacagaatcaccacaagaatcaaaaactttacttccagttttcttaaagtgaacctcaaaattttcatcaacagtttgtgaaactgaaagcaaattgtactttaagtcctcaaccaaagctacattcttcaattcaaaattttcatttacctttaccaaacctgtagcaagaacgacacttgtagaagcatcaccaaagctaatcgattcagtcttggatgcctttttgagagaggagaaccaatttttatcaccggtcatgtgccgcgaacaaccggaatccacgatccacacgttctccttccttgccaccaaagcctacacacaagcagaagtcgaagcctcagtactggggttagaagataataaaaatttaggaatccagtactgagacacatgaccagaagatccaataggcatatatccactttgattttgcaaaagcaatctctctctcctttttctgtttatgagctaatctgaaacaaaaaccaacaatatgtccatctttgccacaaaaagaacaagtatatttttcatgatgattagacacattggtagcattagaagatttagcaatagaagcaacaacaggatattttgcatgcacgacattggattttgaagaagatgcattcaaggtagacatgataccagccgatttaaacacagttttgttagtatcaggtttaaccaaaatctcaccacttctagcaccagcacctaacataacaggaggatgtctagaattatgagcataaggattaaaatctaaaccacggttatgtgtgctaacctttgattgatccaaaatcatgttgaggttctttttaccatcagaaaatcttagcaaagaatttttcaaataagaaaccactttttccaaattagcacaattttcataatctaccatgacacctttgcttttacgacatttggggcaagaaagcgcttcattgtttttcacaacatcttccatatactcaacacgaccgaaagcatctttcaatttcaacttattcaaattacatgttgagcaatccaaaacatcaagaggttgttttaactttttagcagaattcatgttaaacatcaaactagcatgaaaagcaatttgatatttttgcaacaactttttagttaaaaaaaactcatccaaagtgcgtgtgtgcaaagcaaaactaaaagcaagagaagatctatttttcaaatcatgtgtagcattaacatctctaatttttgaaatctcattcattaaaacctcacaatttgagcaatcatcatcattaggaataagagattttaatctagcaatttcagatttaagagattcaatgataaattcctgttttctatacatcttctcacacttcttatttttttcactcaaaatattaatggcttcctcaaaagcacttacctcattatcttcatactctgtgtcagattcaccacgcgccatgaagcaaacatcggagatgttctttcccttatcatcatctccactttcaccatctacatcacttagtggctcgaaggcggcgcaaacttgttgaaaaggcttcctgagattgtccagcttcctcccttgggatgaacccttcagcttgttgttgttgttggtcttctcaccatctttgtcttctcttttgcctctcccaagcttaggacaatgcgaacgaagacgatcaattgaaccacattcaaagcaacgatttggaccacctcttttcctgttcctggcattattcatagctcgagcaattctgttagcaaccaaagccaaatcctcctcctcgatttgttcgagttgatcatcggatgtggcattaaaaacagcaagaaaagaagacttagatgaagaagcatcaacatccaaagaagaagaggaagaaaccaaagcactcgacttaaaatcaacttttcgagaaagaacattcatctcatgtgttttcaatttagtgtaaagcgaatccaaactcaaagtagacatgttaacagactcctgaatagatgtagctttcatctcccaaatagacatgtcaagaccattcaaaaagtgatgagaaatctcagattgtggataattagcattataagaagaatcaacagatctaagatcactcaaaattttattaaacctagaaagatagtcatccaaagcttctccaggtttcatctcaaatttaatgtactcctttttgaaaaggtctcgacgaagttctttaatgttattagttccttgatgaaaattactcaaagcattccaaatctcatgagcagttcgaagatgagcaacacgatcataatccgaacaagaaatcccactcaaaagaatattgcgagctttgcaattttgttcaaattcattttttaaagcagcagtattaatctcttcaggaatcacataaggatgagaaacttttctccaaatatcataatcttcagccataatataagattgcgtcctactacaccaatgagaaaaatccattccatcgaaaacatgaggcttagttgaaaacctagcaggagtagccatggcaaaaactctagatcgataaaaatccaaagaagaaaataaggctctaataccacttgtaggatcgaatcacaagaactaagccaaccaaaggaggggtgaatggttggtatacccaaaaaccgaaaacttttagcggaaataaaagttaccctcgaaatcgacggaagtcggtctgaccgagattgatctgcaggtctgaccgagtggatgccgcgtggtctgaccggtgttgaatctccggtctgaccgccgaagtcgcctgctgcgcttgtcgccgccgccggtctgaccgcccatatgctgccggtctgaccgccggtgagttgccggttagaccgccgaaacccggtgaaacacaaatcgaagaactcttaaagtagatgacgactttattgattctctatgtgtttacaaagtgcaccaacagtactccttacaaaaatttcgactaaactcgaaaccctaactcaaaactcaattcaattgctctctaaagcgataccgggaagcctcacggtccccctctatttatacccgaggtacgcagcctaaagccacgaaccaaactcatactaagagtcctaaacaccttaggaaaccctctagtacaagaaagaaactttacataaccaatcgtaccaaatttggactccttccaaattcgactccgcatcccatacgcacacaatacctccatcgtatgccatatggaatgtccatcaaccacgtgcatcaactctagcctaagtatcccgcatgatctctgaccaccacggacgtcatcttatccccaagccgactcccggtccatcaccgcaaatactctcccgagacatcgagtcacctacacatgaaataaacaaagaaaccatattctgagaccaagctatctccaacttgactcattagtagcaaacaacagtattacatacgtataggatccatctagaaatcataatcatgaaataatcacggatatccaaacaaacaacctgaaaccgaaaccgacacagcgtcggccggtcagaccgtgggctggccggtctgaccgctcgatcaccgccggtctgactggcatacacaactcggtctgaccggtcacataaaatgatagaatcctacgatcacctgtgaatccaatcatctccaaaaccacttcgtgaataaattccaaataacaaaaccaatagtctccaatgcccaattgttcatcacagaataataatcaaaaacacctttgattttacaattattttatgtaaggaaatctccttgggagccttgctcaaatgtatgcaatgaagatccagattgttgaacctgtatcaatctactaatccaggaattgatacagttaaaacatgtcggttaccgaatcattagttttgggacccgacaggatttcgggccagatttagcccaaagagagggagaggattatttgtaggttgttttattttaataatctctgaaattggtttttgttgctttaatactatttagggtgctcgagggaccaatttagagcatgaaaaatttaagaaaaataatccaagccacattcgattttttttcttccctgtattttagtgtttgagatttcttttaagcttttaattatttatattattccctttagaaagtgattatatgattttatcaggacgttgcaaatccaatcccttacaagaatctcaccaccgagattcgaaagtgctagcaagaaggtaggtgtgggtgtcatcttcacttcttatgtagctttccctttcatctgaccaatctgataaaatcttccaagagaactgtttgattggtgagatttttcttcatggcatttctctagcaccaagttgacttcacaattttggaaaagttctgacgtcttcttgatctatccaagctaagcttatatctgagttgccggtacttagagacgccgctttcattatgaggttgttaactttggtacatacatctttaactgaaaacaatattttcttatgtcttgatgtcgatgtgatcttattgtagcttcgcattggctttcttatatttcaatgtttcctggccttgtgatgtggtatatttttagattagttgatgttgaagatgaaggttctatgtatcttggaaacaaatactcctcaagggaataactattcttgctgatttagtctggcatatttaccacctgtcttaaagattaccgccaactggcttgtggttgttgtgatctgtttatcttgtcggcctgatgcttcaccattggatctgtagcaaggagttcctctatattgtcgcatgtagattactttggagtagacacttaacatagcttgaaatggatacaactcgggttcaatatcttaacatacaaattaatgtctgctcttctctgtgggtctcaattatcggaatgcaccttatcctttcatataccccaaccttgatgtgactctttcattggatatatctgccagtgtgatatatggtatgatctactccctagttatcctttatcaatcacctttctgcctatccctttcttagatggtgtgaagcaaatcttctgtttcatcgcctttcagagaaaacttgaaatggttcatcaaaagctatatcgaatgccttgtgaaaatgatagcactctgagtgggtttacaccactagggttttgatgcaacttacgaacttcactttcacttatcctgtcttactataaagttataacccactaactcctaaagcttaatatgcaaagaagccacatcatcatccactaataatcattaaatttaaatatcatgtaaacatgctataatatctataattttataatttattaaattttagagcttttaaaatgcaagcatgttaaatcatgatcccacataattcacataatatttcaatatatatcttcattattttttttatgatatttctctcttttcttattaagtcatatcacatcaattatttttagtgcttaaatgattaatctatggttcaaattatctctctacctttcttctcattaattcatatcacctcaattatttttagcctttagatgattaatctatggtccaaactatctcaatatttttctacttttataaagtcatatcaccttacctttacatttgaattatcattctatatactatttaaatttaaattatcatgaatcatgttaacataagtaatcttatgttgtctagctatcttacacattatttttattcatttttattcattgttagagagtcatgatggacggtcactaatacaaaaatgattttccatggcgtcaccctataatttttgcttgcgactgttgttgatgcgaaaacaaccatacactaaaaccgccagcaaaagcgtaacgagcggtgggggctacaaaccgccagcaaaaaccaatttttgttggcagccacgctaagatgtccgccataaaaaaactctatttttttgaggcagacctcttaattgtcagccagcgaatggtaggtaaagaggaccgtgacaaaaaaaaaagaggcgaataaaatccaccgcgcgcccccaccgtccaccaaactcgccctctctccgcctctttcccttctcccttggtctctctgcctctctctcttctccctcgcatctctccttctccctgccttctacggttgctgtcgccactccaccaccgccgcatcggccaacggagagggcctcaggagggcggctccggcgccggcaggcctcgagagggcggatccgccgtcgccattcctcgggagcagcacggggaagggggctgtcgacgagtaatactcacggactggatgaatagagtattgggtacgttggagcaggggtctacgtaatacgacatcaaaacaaacaaaagacaaggattatactagttcaggccccttatcaggtaatagccctagtccagtttatatgggattgatgatgatgagaacaggttacaaagagagtaactgaaacaggcgataccggcaagatcatagttgagggatttgacgagatctcccggcgagttggctccgtggactccggcttcgtaaactttggtgggtgtgttggcgatgagatgcgatgccttttgcccctccctaggggtcccttttataccgtggaataccttcacccccaagcaagacttggagatatgtaaaccgacacgatatactaaagactttaccatttccgagtaggactttagcaattccttaactcgtagggatattttccataatttgaggcgaattcctaacagcatatacgagaaccaaccgtatacgcgaaggtataccttatcggtatattccataagtcgcaggatagagggtatgccttatccgtaaccctgacaggggcagcggcggcggcgccagctctcagcgtcaacgacgcagggaaaggggcggcggggagtggatccggcacctcctcctccttccctctggcgacgacggcatagaggagggatggcggcttgcgcatgcggcagcggtgctcgagagaggcaaatccagcatcgacggaccttgggaggtggatccgccgccgccaggcctcgggagcggcgcggggatgcgggcggcgggggcggtggctctcagcgtcaactctcggctcagcggcacgggggagagggcgggagcggatccggcacctcctcccccctccccaccggcagcggcagcaaagaggagggatggcggcattaaggtggctagcgcaggcggcggtgtatatttgtgatgatgatgtattgttaatctgttctgctgatgatgccaatgttgatatttgtgatgctttgtatttggattgatgcttgaatgatgttcatatccattttcaattttttttggtaacttcctggatgagatggtagaaagggattttggggatttattttttttcctggaaaatcatttttagtggcggtaggcataatcttgccgcctgcagaagtctattttcgctggcggtccacttaattttgccaccaatagcggacgtcttagcgtggccaccagcgaaaatcgatttttactagcggtcggctacccatcagcacaaatgatgcattattttcattggcctttgatagctggcggtacagttggccgccagcgaaaacctattttggctgctagcaaaaattgtttttttaagtaatgggtggccctgacgatgaaaatggtggccccatggttagcaagctggttttggctggccaaagccaagatggcctggcatctggtttgtaagtctgttggagcctccccccggattgtcaaattttgacttgaagattgagatagtaattccattgcagatgctctaaataaatgttttgttgtctaagaccaaactcagtccagccactgagccagtgtaccaattgcaagagctcgtgaaagtttggaagaagtcaaaccttttttaactacggttttaggaggaacacagatcaacttttagaggctaggcatgttgacttgtttttagaagctgaacttgttgatttttggaaagcacaatatttattctgttcttgttgatcacacgatgcaaagtttgttaacattgttctgtatatcgttgcgatttgttctgttgttgatcagccgatgaaatcacagattgtgttcctgctttctgttgtcggatcaatctaaaatcgacatattcgtagcaattgtatttgtacattttattttattttctcaaaatgattatcactaccggtttgtaactaactaaaatcggtaatgatatttgtttcgttgcgagagatccattgtctaaaaaagggcagtgatgaccaccagttatatatgaatcgacagttaaaagttgtctaataatgaagcataccgacagatttgattaaatttcaaggtttatctgcacccattataaaatgacatccatttgataacagagatctatccaaaattgcatactcatttccactataactcttcaccaaatactgttcaatatcaagtgactatatgtatagaaatttcaggtgactgagaattaataataccattaaaaaaagtagggtttctaaggtttcatacaacatagtgtatatgatggagtgctaggttatattccttttacaagtaacaatagggaataactaaacagcattgaaacgtatataattatgactcctctattttgtcattatatgctattttcatcagatatttacacattcatttagtcattagctataagtgaaaatttgaattttaaaacttagtttattctaggttttttttttgttgaagtttattttaacatttaaatttctatggacacttgcatagaagttttttattcataaaatatttttcaagttgttaataagccgtttcgcctataaatttaaaagcaatcaatggcaataagaagtgagcaccccaaatatgatagacagaatagttgcgaataaatactcaaatatgcaaaaataaaagcaggcttgtcgtaaaaaagtttacaaaactagcatggtttatattcgaaaactggtggttaataaaatattgatccctataagctgttttcccaaaaatataacatcactgttgatttttagctttctaaaaataattaaagctatattgtaactatttgaaaagtacaaacgcaacagtagtgcacaaatggtatatctagtagcctacaatttctaataggcactgacaagcaccgttaaaactcggtgttatgctgtagtacaaataacacaaattcatcgattctcatacagaataccaattccataattagttcaggcttcctggtttctgttcataatcatatataccaaccagtgagaatctgggggaaacaatgaaaagcatagttttaaaagtggaataattcagaaggtaagatatgtctgccaaatgatacatacaagtgtagaaagcattctaaacaagaaactttacaagatttcagcccgtgagttctaagatgttctccactgcaattccaactggatgcggccatttttcgagtcaattagatgatatttctcattgatcctcttattgtttataacatctgcaagacttatgacaacatagccaagattttcctaaaaagaaacagcacagaaggccagaaggatcaatagaagaacgtgaatataaagcactaaatcagtgactatcaagattttaagctttaaaggagatatctgctatagtacattctctaaatttcaaaactttcaattggatatgaactttcacaatacaaacttttttaaaaaaactatctctccgggaaacaaatcaagccaaactgatattttaaccagaaaatttagtttggaatttttttaacaagaaatgaagggcaaggcatgacaacagcatagggattgaacacacctagattcaaatgctacattgttgtgttagtagtggttctttctttagttctttttcggagccatcgacggcatatttgtaaacaaaacataatttgtgaataaaacttttatatacgtgttcttagcgatctaaaagcaaaggctgaaaaataaacttcgatgaaaaaaactcaatcagctccaaatgtaaggttgaaaattcaaattttgactgataagcataagcataagtgaaaagatgaggccctttattgcagcatgtaaactacgaatggccaagattattctggatgaatacttaggatcaagagtaaatatcagaagcgctaactagcactctaggcccccccaggggcaactgtaaacaaactcctacgaagttctccctccgtaaaaaaaaaaaacaaaaaaaaacaaaaaaaaaaatcaaaacaacttctagctacgaatctaaacatagcttatgtcaggttcgtaactaaaagtcggtttttttttctgggacggggggtaaatgccctgcaaagtagtgaatgtatcccgtgattttaaatacattcccacgacagaaaatttgttccttaaattagcatattcaaatatttcttgtggctcttaatgttaataatctgttctatttccccgcaaaaaaaaatgttctactaaaaacaacttcaaacttggaggctgaatttagtaataacttcatataaaaaataacgaaatgagatgctgaaaactgcttttgcagttatcaacaagtttccagtggttctccccgtactggttattagaattgcagctagaattgtcagatagaactttattttccctgaccagctgctgtcctgcagtgggaactggtgtgcctagcaatagtgttcactagttatagcttagctgtttttctcaataggattacacaactaggaagtacaaatctccattaatctttaaacactaaaagttgatgtcacaacacaaatagagataatcagatcacagaaatgataccttggaatgtataccgatgcttggtggtctgctaatgacttcaatttgcattttatcatttatgggtggttcctcgcagacaaactgaaattcttgctcccaacgtggatcacgattcttcttaatatgctgcataaacagtattacaagatcaaacattatattttataatgtagtgactaaaactacccattgatttcaaaatttcctacagtaaatgttattggtgaaagtttattacacatttaaacctgtttttcataccttggtcttcctttcttcacctctaaacacaattcttacatatggattagtgtggtgctttccttcaacgtcttgtgcttcatgaacgataactaccagcaaaccaccaccttccggtgtgccatcaggggctttttcaatggtgccagattcatcacttgtatcaacatcagaatcaccttccttgaaaggcttatatgttacatcaacagtgagctgcccccggaacttgtcatttgctgggtcattagcatccatagtcttgtgtaagtcaagtgtaagtgactttgcctcatcaggaataagctctttcaatgggataacactcattccaatcttgtcgtgcttcccaacctgataagaaaattttatgtaggattgaaagcatctggattaaacagctcaggaggatatttaaaattattaaccattacctgctcccaatcgtaaacagtaagctcaagagcctgagattctgggtctttgacaactaatttgaaatcttcattccattcagggttcaagttgcttcgcttcactgacgttttctttgatgggagtttttcctctgttagctttaacttcacatatggatccgattttcccagaaaatcctttttggtgagtttgacagcccgtacgatgttaacatgcaaaattccaacaggcttcttttgtgctcttcaattcaatgttataaaaagaagataccaaattagcaaccagaaggacatgccttgcaaaatagtagatagattatagcatgcattactttgctggatccatgattggcacctcaagtacttttggccacaagtacatgtttgctacctgagtcttgataatctcctgcaaggtagggaaaagtcaacagttgccgacatgtcaccatcaacatttgtgaagaaaaaacgccacagattaagttagagtagacaggtgaaaatttaggctaaaatgtagtagtggaataatcaaagaaaaccggatgaataggcacttaagcagaaaactgcgagtggtttagtggagtttatgttctacttaatctttctcttataagggatacgtcaaatcattcattattctataattcatgaacaccagaaatgcaattgagataaatgaaatataaccctatgggatatatcagtatatcctaaatatttgatgatatggaaactatgttacctgaacaaatacatagagacctggaattgccatgagatctgctcctaagagtttcagaccaaaatcaacatgtggctgcaaagaagaatacaagcattgacgattccatcagtaattaccagaatgaatatatgcttgagtgtttaccttctccataagtgaaacaactattttagcaaaacaaggaaagctaggcaccaagggcttcaacgttatgcgtggtagagcaaaaacatgcaaatcaataacctacaatattagacatataatactggatcaatataacttttgaatagaattataagtctgcaaattagcctaatcccatcaggacggaatcaaaaaaatatatatttcctttaattttcacactttctcttaaatggttgtacctgtgcagttgcttttagcccaaatgctttgacaacaacagtgatattcggatttccagcccacttgatggaaggttccattataagttcttgctcatctgtggtgtagaccttcatccctatatggaaagttacggaaatgcgatatcatctcatcatatacaaaaacacatcagtcagacacaataacatcatctaggtgcttaagagaaatatttagaattaggtagaattaggtaatgcagagcagagttatgtactctgaaattattgtgtatttcaggtaatgcggaactatcatagtggaaacatgctggtacagatagtaaaccttgaattcatatgtagcaccatatgttcatgcgcttgacttagcgagtagtaatgagataagttcatatagatactacaacacaatggcatatattcatacagagcttagtacttatcgtaaattttgtttcacaatggtaaatgaactgtcagatggcttgttggtttgcatctgatccgagggaggagagcaggaggtcatgattacccggctagcaccgtttgtttagattgctcacatgggaagcgttgggacatttcgcgttggggtctggcacatgagttcatggtcgacaactctgggataaattgggcctggtcatttggggctagcagaattccagatgaatacagtacactgaagcaacggttggtagaacagtgaaaccatttcaggcttcgtatatggctggttatactatttaccatttccaggtgattaggtcggtataaatcaaaacaagcgtcaattggtcaggaatctctgtgtcatttgcactcctatcatcacacgaccaatgtacaacttaagagtctacctggcagatttacaaaatcattgtcacccaatttggcctaacataatcttaggggcaattatataagcagatttatataagctgatggtaggatcaagtggataacatatcttgctatagatttatatgagaagctaaaagcccatttcagcatagaaccttaagccacattgtagatttgaagaattgcatgttcaaaaacttacaagtcaagtgtccaacgaaagtatacataacattttgggtggtatattcgataagtggatctacttggcttatctatactccttataaaagggagtagtggtggtggtggttcttccaccaccccaactaccaactcccaacttttttaagaaaagaaaatgatatgtggggctagaggggccacatctcaactactcccaccaactctctacttttcgtgggaaggaaaaaggatttatgcgggactaaaaaggtccacatgtgattaacaaatatgttcaacaattaagagatattaataacatgttaatgataattttctttgattaaaattccgttgcaacgcacaggcaatatgctagtatgctataactccgctaacatacattttttctttttaagctaggtcgaagagagctttatcacaaaagtgcttaattggcaccataatcctgcacgtttctcattgacgcggaaatgagtgttcaaacttcaaataggtttacctggattggatgcctaagttaagctaggcagttactttatttttggtttcattttattagtgattattgataatccaaatccagatagaagcctgagtgcttgagcaagagtagggccaataacatgagtttgttaggaacataagtgggctgggctggctccgtcgcttccaaagcctagcccgagaggagaggaactacaaaacaacagagtatgcacttctagggggagatcgatcgagcaatcggcgaatggcgaacggtggcggcgacctggtggccggttggcaccttgtcgatcttcttcctccctaccttccttcttcctcttccttccagaagtttctggcatcttccaccagttgaattcccttagttcatcctcctctccacctctatttactggagtttggttgctattgcactggatgcttgcatatttgagtggaattgagattggaagtctcggttgctaacagagttgtaagactggaatgtacacctaaacaacttgctgttgctaggtatactcacatttggcacataagctataaattcaataaagtaactttaaaaataatataaactaagtgtaactggccctttgggccatactctttctattctgacaaaggactatgtagtttcataactgactcttcaacaaaaatgtgatatttcacataaagttcataaatatagttgtttcaattagccgtggatctgaatcttccatggttacttgatcaaattagttaggcattcttagcatgaaaagtctttttacgatgtagcaacttttggctaaaaagtacttctgtgtaattaaattgatccaaaatgtctgcaactaagatataagagtagaactaaccttgaaatgttggtggtaatgaacctaatgttaatgtctcaaattcaaccgaatcaatcttatacttggcagtgttctcagcaataattggcttagcgatttcctttgcagttttacatattgcctgtaaaagacaatatttacaaaacagtgccaaataaaaacttggacaaataatattgcactagcttgtatgagccaaccttgtcaagataaggccaaatgttttcgacaaacttgttaagccaatcaatcttcataaacaaaaagttaaaatcagtaacgttagactataggcctattaaaatagaaacttaagatggcatgacaaaatataagcttcacgttcacccaaagagtaagcatacccggtcaaagtctggattcttcacccaatgaggaacctcaggaagcatgctttctagagattttgtatcaagttcaacaagtggcctgattacagggtcctgtgcaattgacattcaaacagcaagtggtatgttatgtaatggcaatataaggctgaatcatgcaatcacaatgacagtgatagaagatacagatcgatcaaatctcaagccagtataccaagtcatggttagaacatctaagagactaaccaatctattgaatgctaataaatttatgcattctaccagatagtatgtacaagctgtccacttttattccatatgttctaacagaagttcaatttcaacggtgcaaattagtaaattccaaaaatacaatatggccgtcatttgcccgtgcaagcataaaacagatattcaggttgtcctggaaccactccaagaataggttgtcctggaaccactggaggaaggaattactgtgatttttgtacttaggtgttttctgttggtcaagtcaattcctctgacccattgcaaaggacgaacaatattcaatctgaaacaggaagaaaagtagagcaccctgaccagctctttttttagaccaaaagcggaacccctgcttccatacaaagcaaataaaaaacaagagtactagagagaccttttgaggtcgctacaaaagggaaacaaagccgccacctccatttacagagaccttgaaattcaaaataaagtccttgaaattcaggagtactagcaacgaacatctgatttgctttggtacaaaataaagcccttgaaattcacctcatgcataacgaaaattcgtagattgcaaattcgtcttctcataaatcacatccaatcagatgattattcttcacatccacagtagagatgcagggctaattcgaaggatcccattagaacacaatcctactgttatacgatgaaagcaagctaactccagctaccctatacagcaagcccaaaccaaaggaaagaactaaacgatgagttttcaggaatgcatatcactgtatcatctcgtacagagaagcctcgaaaaccatcccgtttctcgcttccagctccactaattcaccccgatgccaaaccacaacgaggcatccaacgaaaagaagggtggcgaatcgtaccttgacgtcggtgggctggaagtagatgaagaggtagtacccaatcacaagccccatggtaactcccaccccaaacccgaagaaacccagcacagtgcggaaaaaccccatctcctccccaccaccgctcccccaacgcgagccgccgagaagagcaagaatccgaaagcgagcgcctcagatcacatgaagaggagacgtgaagcaagcaacaggggcaatgtcaaacgaggaagaagatgcggatgggatctaggagaggagaggatgcgttgcagcgcgcacagtaacagccaggatggcattgatagcagcatccctcgctcgctagtggtggtagggaagggccattattatcttcctaataatggtgcggcaaatggggttactaggcttaattattatctgcccaatcggccacacgctgctgaattgctcatggtgattggtgaggcgagatcgatgacgaggtcgccgctgctggcggtgtcggcgcacgctgatggcaacgctcctcccacaagatttcggaaacggttttttttttaattttttcgttcgggagtacctgtatatcttccgaaaaatttttaatggtcgtatcacacaattaaaatttgatagatacagtaaaaggcaaaaaaaacaactaagaaacaccataatggacactaaattatcatatcttcaagaaaaaaaccaaatccaatataaattttaaaacttacatgcgaagatttaaaaattacactgtaacttacaaaattacaatataagtttcataaattacaatgtaacttaaaaaaatgcactgtaaaaatttaagtgagaaaatcgagtgagagataagaaaaaatctttcgagtgagatatagcaaaatcgttttcgtttctaggatgcgagtcctgtatctctcgacgggccttttctgtgattattttttggatcgctttctggtacagcaccgtgaggtccacgagctgtgtatccttttcccgttgatcctccgtgtacaagattgtcgatattgtttctttctttaggtttacagaaacaaattcagcagaactttcatattactcatttactcatgcatggaaaacatcataagctctactattatactcaaatagaattcagataaaattcatgtgaaattcagacttactaaactgaaccaattgagcatatctctactattataaaaattgaagatgtttttaccggtacattggtacatcatccgtgtatgagtcggtttttaagttcgttcgcttttagaaatacagatttgtatttgagtgaggttttaaatccgttcgcgtttggaaatacagaaggagtcatataaaaaatatgttttaaaaaacttgtatgctaacttgagatgatctgactcataattgcagctcatgattttctaaaaaacatatatacaagcgaattctcacagtgaaactattataaaaattaaagatgtttttgtccgtactttggtacatcatctatgtatgagttggtttttaaattcgttcgcttttggaaatacaaatctgtatttgagtcgggttttaagttcgttcccttttgaaaatgcagaagcagttgtataagaagtcgctttaaaaaaaacttacatgctaacttgagatgatcagactcctaattgcagctcatgattttctaaaaaaatatatatccaagcgaattctcacaattaatttcaccttaactaaaccgtacaataataataaaattaaaatagccttcacccattgcaatgcacgggcaatttttctagtctatatactaatataaaaagaagttgtccctagcaatcttacacgtgaaatcatcccctgtcatctcatctgtgtatccactatctcatctaatctcatccgtccgctatcttcctcgttgtatgctattcatcagtgattccaccgactccgctgcataaatccccgccacgatgactccgccccccgaatctccgtcgtctcctcgctctgcaagcatcctccctcctcctcgcgacggatctgcaacgatgcaccgctagactagcgcaccgctgccgtgactcctcgccgcacgcatcccctttccgctagagccttgcccgggactttccccgatggcgccgtggtgcttttgtgcccgcgtcgtccaagtttgtccatcgttccgccaaaccttcttcaagattcttgggaacttgtgatttgtgcacttcttcaaggtgaaggccattgggtttgcctgggatcatctcactcaggtattggatccttctagattccctgtttattctcatgcaagtgctaccgtgctattttgagctggttgggactggagtcaccaagttagttgggttggcataaaactgttttgagctagcgagttgcatatttcgaggttgttcagtgaggaaaattgaagggtagatccgttgatttggggttataatggtactaatcatcaaaattcctactgattattgacatagcaattgaatggtttagctgtataataatgtttagttatatataattgctgaactaaattatatgtttaccaaactgctttgatttttatccaattcctcttggaacatcaggtcagcagctatcaatttaagaaattcctttttccatatttcccatcacattttgagtcgaactatattcctgaattcatctatgggcatgctgctcgcctagcgagtcactctccacaaagggtgcccatgtgctgttactattcatgctatttgattcttttgtgtgtacatatcccaaaagtttgattgcattttttaggtagttgacagatgaactaatatacttgcaagtaacatatatacggccgatcatcaatatatgtcttttttaacactaatttggcatctttttttatcggtgaatgacatgcaaaacacatatttcaggggtttgccattgctcaaataccattatatgtgtcgacgggggatacccgtagaccggatatagatggtattggggtatgttggtacgaggatctacgtagtacgacatcaagcaaacagaaaacagggattatactggttcaggccccttgataggtaatagcctaatccagttggtatgggattatatggttgaaaccacagattacaaagggaatatcagaactcgatgataccgacgagaccgtagtcgagttggttcgactagatctcccggcgacttggctcctgtaggctccgacttcataagttgtggtggatgtgtcggcggtgagattctatgccttaggtcctcccggggggtcccttttataccgcaggtcagttgatctccaagtagaacttggagatatcagacctcacacaatatagtaacgacccagtccttgtctgagtaggactccttccatccgtggactccgtttctgttacgtgatgaatttccttaacgtgtacaggaaacatccgtatacgcgcaggtgtaccatatcagtgtacaacatacatccaagggtagagggtataccttatccgtaaccctgacaatatgcattgtttcaagttgtagaaccatactatctttttttatgaaaatgctgaaccataatattatcatttacagtatatataattatacatttatgtgtccatctatactctttataggctattttcaagtcttaactaccaatgtctctacaggaacgagctccacttgatgatcttgctaattaaagtgccatgacattatcaagctctaaggacggcttgtcataacaagctatagttttttttttcggggataacaacctatagttacttctatgaattttgtgaaataaaagatgatccatttgtgaccattgttcgagactaaaaacattacagattgcaagagcaaaaggcaataatgtgagggcagggagaaaattctttttcagcagagttaagtctgtgaccatgttttcataggaaaatccattataaagaaatgaaatggaaacaacttcccatggtgatttcattgaccatcgaggacatgagtgatgtaggatatcaatgcagtaattcacgaagtgaagaatgcatgatttagttggaggaaagggaatacatgatgaagatgaattgtacaataaattgtcttatgttaaattaatgttgttttctcatctggtgttttgtaccattgtaatactccagctgttgtaattaatcaagtgttaccaatgttgaagtggtctgtaccttgtagcagtctagcagagcactaaattttgttctgcgcaaaatttgggataaagtgagagaaggggatcctgtttacaaatttcaaataaattagttataaaaaatccaagcagtttaaaaccagagcaaggcattcccttcagttttgtttgcccctttccacataggagacagtgaaaaattctaagaaatggcatttccttcagttttattgcccctcttttcacataggaaacaattagaaattatgtacgcaacatgaacaatttttatttacaccaagattttctgaatggtgtaatactaaatggggcagattaaaaaaaattgatgtcacaccttgatgcatgaaattaccacctcctttttaaatatataacgttgttgatttttggacgtgacgtttgaccatttgtttaatctaaaaattatgtaaatttaagtcatgcttaaaagtccttctaagcatgacttatatttatatctttgcgtattcatactaaaattttgaattagacaaatattcaaatgtccaaaagccaacaatatcatatatttaaaatgcagatagtacatttgttgtttatttgtttcttaactcattgcatttataatttatcaaatattacacattggttgttttattacatatgtggattccacgtatacacttacattggcttattgaaatgcccatcctagctttggacgatataccaccgtaaatttgatttttgatataacatatttttacaattgtattacactggacttaattcatattggtcaagacgtgcattgcacgtgtaagattactagtagaattgctaaagaggcttaaagaatcattcaataaaatttgatcgacacttaagttgggtgtagtatactaaccttccaaagtttcgattgtgatcgtgtggtcaattggacgataaacctggctggctggtacaaattcctgcaagtagggatggcaatggggccccgacacctcacacccggtggggaattactctattaggggatgtaaatgggctaaaactaccatccatggggctgaaaacggcaaaaaagaaaagccctcatcgggtgggccgggggcggagccgttcaacagtccccaggccccgaatccccatgggtccccgaggtggataggccacgctatatttcctaagcccacaacccaattagactggcccaattaggtccacatatataatctgagcaaaccctggtctaccgtctccacttctcagtcttcccatccccctcctctcagatccaatcgaccaggcgacagggcgagggcgcgagacgccgccttgttctgcgtggcctcgtccgcgtcaccccatcgccgcttccaagctcgcagccccgccgtcgcctgctcaaagctcaccgccgcagctgagggaccaaatatgtcacatcctgatttttgtttcaggatttataaattatttaataaattattattagaagttatattaaatgttcattaatttacaagtgaagttaaatgtgggaaataaaatttccttaatataaagcatggatggatttaatttttattaaattctccatgattaagtcaactctctgaaattttctcggatttttcggagctcaattcctaaatgatacaaagaacagttcagtaattatttgattttaatgatctaattatatttgttaagagcttttcttgtttaaaatccttaaattataaattgttgtttaaaaggaattattagaaatgattttaaaagcctagaagagaagatctaattttaatctgttaaatctcaatataaaattgggctagataaaattttgttaaatactttgcttaattctataattcctagatttttctgggatttatttgagctaaggaagtatttttaataaatggaattgcatttcatgaataatttaaattgaaaaaggtttttaaaagtctcttttggctttgggccgaaagccggcccaaaacctcctctctctctcttctcggcccagtcggcccagctcgagccgctgctctcttctctctctcggtgccgctgacaggtggggcccacctgtcaggcctgtcttcctcctcgcgccggccgccgctcgaaccctagcgtcgcgccgccgtcgtctccttccaaatccggtcgatcctttcccgatccggggaaatcaatagaggggaaatgatcttctcgatctcctcttccttttctcttatggaataatcgcctaattcggtttggaaactcgaggattcgaggtcgaatcggatcggtttctttcctccgaaccctaacctttccttcccgtctccggtcgccgtgggcctccgtcgcagctcgctagcccctttaaaaggatccccggtgtctcctctacccgccgccaccctcgccttcgtctcttgccgtcggaagcgccctagcgccgtgtaacctcgagccgccgtcgtcgccgccgctccagccatgcgccgccgccgttccggtcgtcgtcgtcgctcggggaggtcgccatcgtggtcgccaagtcgccgccgtcctcgtccgcctcttcgtcgccgccggagaccgccggagcaccgccgtcaccgtcgacccgaaaaccgccgccgtttcttcctcgtcaccggcgccatccgttgctcctccgccgttgctttggtcaccggtgagttcgccgcgtcgcgctctacccgttggtgctctccgttcgtgccgtcgcgccgttgttcgccggcgagcgtgcgccgtccgagccgctgagccgccgccgccggtggtgacgtcatcgccgacgtcatcgtcgccctctcccgtgagccggtcgtggaccgatcgatctcggccgtccgttttggatggatcgatctcggccatccgttcgcgtgaaccgccgccgtgcgcccggtccaccgcgaaaccctagccgctgacgcaataaattcccttttccttttcaaaaataattcattattgcgtcataattcaattaaaatccatataagtgttttaatccgatttaatctttgaaaattcataactaattcatttgaactcagtttaatgtggttcaagttgcaaaaattatataaaataaagatctacatattaaaattgtccataaattgaattaaatttatttaattctttttaaatgggctttaattagatttaatcttgtaaaattcatattaaattcatattaagtcagaatgaggccgttcaagtctcataattcatctaaaattatgatctacatgtttgtttactttttatgtattgtttatttggtttttattagtctttttcctcgttttgcgtgttagcttgtcgtttccgtcgttgcgaaggttcgcgagtgcgccagaagtattcaagaagattaattgaagaccgattattgcaaggcaagtcacacagatcctaaacacaatcctttgagcatgttgatcctatatttaaattctctatttatttcaactgtgcatttattttcgaatgtcaccgggtggtgtgaacctattcctttgttatggcctgtttgcattgattactctattccttgataccttgggatattataacttgactagttgagctttatatattggttcagctagatattagatatgattgcttagccatgcttagaaacattagcacactattgggataacttatgacttactattatttaatgatggcttaatgatagttcacgatggtcaatcgtgattggttaattaattacttgccaactaaaacttgataatggtgggttgtgagcacatggttttgagagtcgtgctcatgacaattaaggaccggttcgcgagctactattgtgaaacattaaccgtgccaaccacaagccagcgtgggcaacggctttaccttttgtatagcatggttcattgcagagcaccaggttgagaagtggtggagataagcccacgggggtcgctggggagtccataccttgtttataagggggtgactatgatccgggaatggtgcaatgtggtgagttgtgttgtgcagagggtattgtcacagcctctattcgggtactttccagtatcgcgacgcatggtagacatgatgttgaggctgtgtcttgtgggtacagtggtacacctctggccagagtaaaactattcaaatagccgtgcccgcggttatgggcgggttgagcaatgtttttcgtgattagtctcacacctctcacaataattatggatgttatacctggtaataatttgcttagctcctggtttggagttagatctgtacagccgggtatggttgttcagaatggttgggcctgtgcagcatgggtgtgttgttcagtgttgattaaaatgtctgattaattactccactgttttacatctcttaaatgttttgctaagtgctgcttttgcaaatgagcctatattatgccatcctttggtatccttgtgcacttgcatatttgctgtgtggcttgctgagtatgtcatatgctcaccttgcaataatcaatcaacctcagttgaagaataaggatccagaaggagaagacgtttggcttataccccagttgagctgcctgtgggagtggagccggagcttcgctagattttattttccgctgcagttttcttcatggtgaggactaagtgcctcttaagtaagtacttatcgttttagttaatttgatgaatctgtatattaaattgtcagtttgtgtacctcggctgattcctggatgaggattttatgcacaaataagttcggaaattactagtgaatttccgggcgtgacaagttggtatcagagccatctcgactgtaacggagggctagcaagcggatgccaccgaccgagtcccggtcgaagatttgaacatgaataacttcaactggttccatggatgttaacacttgatgcgtttctttgattttcctttgtatttctttatttttttatatagaatgcattaatttgattcattggcgcctgtgcatagccgcataacctttctgtttgattttcattagcttcgttggcttcagttgcatgcctgctagacatgaatggggatcttgctcctcgcaatgtcttctagccaatggtgcagccgtgcaggtgtgtatccccatggggccccgagaacccagttggggatagggacggcgaaaagtcagccttgaggccggggacgggggcggggagcagtcagccccgaggctggggagggggagcggggctttttgaagtgtccgggggcggggtagcactatccgttggggatggccccgttgccatccctagacatatatatctatctagattcattaacatcaatatgaatatgggaaatgctagaatgacttacattgtgaaacagagggagtagttttttcttcctgaaacattttttcctcttttctacttcctccgattcacaatgtaagtcattctagtattttccatattcatattgatgttaatgaatctagacatattgatgttaatgaatttagacatataaatctatctagattcattaacatcaatatggatatgggaaatgctagaatgactcacattgtgaaacagagggagtacaaaaataaaaaataaattaccaaattcaagacttgaacccatcacctcatagttcaaagcacattcttctaaccaattcatctaatgatgctatttgttttaagaattttgtgagaaagtaatatgattatcaattctaatatctttcactaccgaaactcataacatattactatgctccagtagtaacattgttgtgaaagtataggaacacgtgacgttactgtagaacacataggacgttactgcacttttggcagtaacgtcgtagtaaaattgtagtagaccaggaatcgaaacaaaaatatatgggttaaagccttacatgctaactatatatttgttactgcacaaaagtagaagtgttactacataataggtgcatgttaccacttccaagtagttatgttactacacgataatcgtagttttactatgtcagttttacaagatgaagattgaataggtgtgctatgggtaaagtctgtaggtggctttgagtgaggtctgattgatgtaggagtgttttgaacaattttatacatttgataaaactatgttacttcatatatatacccatgttactgcaaattacatattctgttactgcatatggagtgttaaagttcaaaatgccaatatttgaaaagcaaaatctcataaggtttgtattattttttaaaaccgttttcacaatgatgctatagtgttactgtatgtggaggatagaacttcaaaatgcatctacatactctcctttttttgatgagaaacagtaggagaggctcctactgtgttaatagattatatatatatatataaagatatttacaaaagagagaaaaaaaagaaaaaaaatactttacaagggatctagaaaattgagtctttccatgattgatatttttgtttgtcttcctccttcactctatgcataagaagagtgaaatcctctttgaaaccaatcctccacaagtggattgaaagctggatgttgttgaaaattaaataattcctttttgtccagatctgccagcaagcagtgcccacaacttctacatactctcctccttaagaaaccgttcttcctccctcttcttaagaaaaccggtcttctccctctaatatagtgttactgcatgcatgtatatgacgttactacacttttgacagtaaatcaaatcaggaatatatgggttcaaagtttcatatgctaactatttacttgttactacacaaaagtaaaattgttactgcacggcatatacacgttaccacctgacagttacacattactgcatgtttatgcagtaacactatccaagaattgcagtaacacactttgttacagtagaacatatagaacattactgcatatttggcagtaacatcgtggtgaaattgtagtaaaccaaaaataaaaaaaaggattaaaagtctcacatgctaaatatacttgttaccgaacaaagtggaagtattactacatatgtttatgcagtaacgctattcaagaattgcagtaagacgcattgttactacaaatgttatggtctttactgcacacttacagtaacatcgcgatgtcattgtagtaacgtacaacagatagtagtaacgagtagtaatgctatcatgtgatccaaaaaacccaagcttcgaagaacaatatctctcatgtgatgtatgattcttttaaaccgtttgcaccattatgttagaaaaaagtgcttatcaaaagtagatccatcttgactatatttcaactaaatttgaatgttgttactgcacgtaaggcacaacattactgcacgatagctgtcgcgttattgcaccgttccgcgagaagatacctgagaagaggtgggtggtggggaattggtaggtggtttgaccgggctttgaccgacatgggggtgctttgaccgatctttaactgaggtgagaggggggtttgacccttggaagggaggggggtatagaatagctattctataccttttctataccccgagtgtagaatagtttatttatatatatatatatatatatatatatatatagatagatagatagatagaaaaactattcaatacccccctccatccaacccacctcccctccccccaagggggcaaaacccaccccccacctcggtcaaacccgcccgtcactttcaccaccacctccactcttctcatctctcgtctcagaacgacgtagtaacgtgatgttcatcgtgcagtaacaccatgtcttacttgtagtaacaatattgaaatatagtcataatatagtcatgacggatctacttttgataagcactttttttctaacatcatggtgcaaatgggttttaaaagtagtacatgatgcgagaggtattacccttcaaagattggttttttaaaaatttggctctccacgagcagtaatactatatcataaatattactgctgatctgttatgcgttactgcaatcacatcataccgttactacaaggtgtagtaacaattataagtttcatagtaacatagtgtgttactgcgattacttgataacgttattgcaagaatatgtatagtaagaaaaaaggtgcagtaacatggagagagagatgaattggctcggtttactcatggggcaagggtagagaaaaccttcaaagattggtcttttgaaatttaactctccacaaatagtaatactatatcataagtgttattactatgtattatacgttactacaatcccatcatggcgttactacgaaagtgtggttaattttataagttttacagtaacaaagcgtcctactgcaattcttgaatagtgttactgtacatatatgataatgttactactgaaacaaagtaacttgtgagttttgtaataacgtatctatttttcttctactgtggaagtgaagagagagatagagagagatcgggagaggagagagagtagagggagagagagaccgggatattatttactctgttactacacattagtacattgttactatatttatttcacatattactacatgtttgcagtaacacagtacaattttgcgataacgtgcgagagtaaaaactatagtttaggaatggtcagttgtatgaacaataatcaatagcatggtggttactcctactcatgacaattaatgatggtgtgtctcatgttactatagtaatctataattttcttggtgatgttactatagccgtgtagtaaaagatttgcgataatgcagtaaaacggtttggagtgtgcagtaataatcatcatagtgttgttactacatgttgccaaatatttatatggattagcacgtgtgagaatataaaattcacctcctaccttgcttaaaactagtcaaagcgaattaatcatacccaatgtcgatcaaacccctaagcagatgcaaattcatgtggttaaaattgtgcaataatatatagtgctagagagcagtaacaacttatgtgttttacagtaactgagcttgttactacaataccgtgataatgttactatgaaactacaatagaattaatttgtatcttacattgcgctagaatttaatctaccatgtaccatgtattttggtttgatcaacatactaaacgttagaggggaccgataatgtgatttaagtttaataagaatcgatcatcttatccctttctcacaaaatgttatagagatgaattgaatagaaaacttgctttaaaccataacgtcttgagtttaactttggattttgtaaatttagtattcaatttttggagcacctgaaatagataggaaagaaaatggagaaaaaaaagtacgtgataaaaaaaaattggtgcagagaaaacaattgggaaagaaaaaaagaaaaaacaatggagaggagaaaagagagaaaaaaaacaacggagaaaaaaagagaggaaagaacgagaagggggagggaaaacaggcatggagggagaggagagaaatagatggatcttgaggagggggagggaccgagaggggagggggatagaggaagggagggagagcgccgcgggcaggcgcgccgtagccgaggtcggcgccagccgtgtggctcacctcttttcagcaatggagtgggagggatgggagattcttttttttctcgatctttttttctttttgtcgctgtttcacaggaggacgggcgggatgggcgcgagcgggacgccgggaccgcgtggaacggtgcaagcgggaggagggttattctatacccgggttgtagattagtcttaccctatatgtatatatatatatatatatatatatatatatatatatatatatatgtatatatgtatatatgtatatatgtatgtatatatatgtatatgtgtatatgtatgtatatatatgtatatgtgtatatgtatatatatatatgtatatatatatatatgtatatgtatatgtatatatatatatatatatgtatatgtatatgtatatatatatatgtatatgtatatgtatatgtatatgtgtatatatgtatatgtgtatatgtatatgtgtatatgtatatgtatatgtatgtatatatatatatgtatatatatatatgtatatatatatatgtatatatatgtatatatatatatatatatatatagcattattatacatccctcccttagaataactattctataccccctccttcccaccagcccatccctcactctgattggcccatctccctctccctcccgggcgctacgcgcgtccccgccctctccctcctccccctctcctcccgatcgcttcgcccggccccactcctctccctctcctccggatcgctccgccagacccccgccttccccttctctccctcccgggcgccttttttttcgcttttcctcctccctctcctcccgatcactccgcccggcctcgctcctctccctctcctccagatcgctccgcctgacccccgccttcccctcctctccctcccggcgcctttttttcgcttttcctcctcctggcgccctcctctaatttttttttcttttcttcgtttttttcctctcccatctctcatttttccttctattttcttctttttttaagaaaaactataaataaataaattggtgaattcaagattagaacccatgatctcatgattcataacaatctctactaaccaattcaccctatgacactatatgattcgtgatcattgtttgctttatttgtatatctgttcaaattttgtgaacacaaacccgttaggttactataggaatcataccttgttactatgattcggtagtaacattatcgcagaagtgcagtaacacgatacgttactgtgaaatttatagatcgttactgcgaaatttataggtcgttactgcactgtttgcagtaacatcatgatgaaaatacagtaacagagaacatatggtagtaacggtactactacagtatcactgcttgtacattgctaaatttttaaatctcaatcttgtgtacaagtgttaaaaaagtgcatgtgcatggtcacaagttaacacaagtgttaaaagtacatctagcaagctcaatacaagtaaacttttagaattctaatctttaaacaacaatatctctcacatcgcatattattttttagaaccgttttcaccataatgctttaaaacaacgttacaacaagacaatagtcatgttactacactacgatcattgagacaaaaatccttaacgaaacttgatccatcatgactattttataacgttgttactacagaaaggaaagtagtcctgttactgcacattgaacgtcctattactacgccgtttcagcaagatgagaactaaaaaaaagtaaatctcaatctttagagagcaatatctctcacgttatatagtatttttctaatccgtttgcactatgatgttcgtaaaaaagtgcttaacaaaactagatccatcatgactatttttcgatgttgttactgtgagaaagctatcctgttactgcacgatgaccgttatgttactacagattcctgcgagacgtgaacaacaaagtggtgggcgggggagggagtcaacgggtgggtttgactcgggtttgaccggtgggagggtgctttgactagcctttgactgaggtgggaggggggatttgggccctagggagggtgggggaggtgggattggcctatgggagggggggtgtagaatagttattctaggggaggggtgtagaatagatttgctatatatataattatatgggtagagtgacacaaaacaaaggacttaaattctctcattaaataattctaggctaatgtgaaagaagaaatagaaaagcaatcattgctatacttataatatacactcaactttagtttgtatttgctagttgtgctgaccaataccccctaacagtgccctcttggtgctttgagagaccaccccgggttgccaagtttcttacgataatttgtcattgctatccaaccggggctaaatatggaggagtaccctgcctaggaaactgtcttaggaatatatgccaacgtggaggaatacccgtactgagctgtcaccattagcggcccacctctactgtctcacagcatatatgcccaatttatgatatctaataaatctaagcaccatacttacattataaaatattactctatatccactagattaatatagagcaatcatttgcataaacattaaacccacaccactgcacctctctgataaactagtcatacaactatattggcacaaatataaagtaaaaccactactcagacaaagtaaagtactgaaggtatataaagaagaatattcttttaattccggaagtgttacaaaagaagaaagagaagctactagagccataccaaaatcttccgtagactcgaggactccgagatactattctattctactccacttagcactagagcactaaactaaacttgagagtgagagagagagagagatcaaagcttcttgcttgagtgtgtgatgaagtgaacgaagtgaggttcttttatagcaaagctatgacagttggaaaggtcggaaacgccctccaactatcattgggagttgatcctgtgagggttcggctgaaccctgggctggcccaaccagcccagtttttggcaggctctccctgttgctgcgtcacttcagagacatgaaatcttgggccttttgaggttattgctctggtttgtagacccatttacccataagtctgtttctcgacagcgtccgattgattgttcgttagtttttatattgattcttctccatttatgtagaaatctctgcaaacaattaataccccaagtacaagtgaaaatatattactctaaagcaaaatatgcattgcaagtatagctagttctcttttattttagttgtattgacagtcgaagctggtctataacgaccatcaacactaatccagacactgggaaagcgtaaagaagcaatttccaagaaaacatccaagaaacccaagacttctaaatccaaaacatctgccgatgataatctttctcccattgatccagaagttgaagagttcttgacagaacaagtggaagaagaacaagtcgatgatgctcctgctactgtggttgatgatcctaccaatgaaaacaaagaggcagatgacaaagactcagccgataatgaagcagccgatacaagcattgttagacctcgcgctcctactcatgtattggcaagttctttttatttctatcctttcatttcagctgatattatcaattctgacatccaacattttcagcccaaggctccatcgtcttctcctcgtcgacgagcaccaagtgaacgtactacttccgcgatcggcagccaacagggagaagaagaaataactgctgctgttgtacccccaatccaagtaagcatacccatatcacaaattcctggccatctttgctttttctcatctttcacccatacttcgcagaagctagccgatatgttttcatcttacataaggcaatttttggacgaagatgatgaagacatcacaagcaagaccaaattttctatctctgatgacttgagagcacgactgttagacatagctgatcgactgggtgcttcattggatgctttagtgactgacagtggcccgatcaaagggagacttgaagaagtccaagatcagctgcccgatgatataattgacgccatcacaccggcagctcatcttgaatcgcgtcgattctagtttcaacgacctcaacaaagattagcagatcgccttgaactcaaggctatggaatcgactctccaatctagcaggcagcaagtaaacaaaagcaaaaccaaacttgatgaactaattgctggcccagaatcaacccaaaagcgcattaatgaacttgaacagcaagaacccgatctcctggcaaaattggaacaaactcacaagaatatattgcttggagaaacagaatttagccgatcttcccaaggccattgaagagcaaagatcaaagttgaaggcattgaccaaacatctacctgctcaaaccaaagctatgaagcttgtgccaggttcggatgccgaagatgcaaagatcatcgatgaagtaaaccacatccgcctacacgcgatatcgacaatccaaaatttcttgggttgatgtaataatataaatcttaaaaaatttttgctcaaaacacttgaaacatttctgtgtaaatatatctattggccttcaagccgattttacttctaatctttatatacttgttaatattttgaattttttggtctaatcagtggcaaattcatacaaactaacttgacaaactcacctgaacatatatcatgaacataggacttaataaacatattaactcacatagagtatattatatcttaattataaacattctcttaacataatacaaaatataaatacaaatcattaagcaagtaacttgtgacatgtgcatcatgaactgaatatcaaacctaacaacatcaccttaggtcaagaagagtttaaatataatttttatagatgcttagatccatttctaaagtgggaacacatatatagagataggctagatgaatttctaaaaattattggtacaacattaaatcttggcaaaattcacacaaatactacctaataattacaacccgttgtaagtttggttaaattttatcattcatccttatatcttgagtaaatcacttacatgtgtgggatgtcagaactgagcaaaagtagatgcggactttaaaaaaatgaacagtaatggctcgctcaccaccacctatagagcccaaagaactaggcccatatagtctagtacacaaaaaaaatagcccatacagacggcccatgagaagtatataggtctatctctcaacatgaatctctaaatatattagacggcccaatggattttctgacgtagaaatagaaattccgcattcgtatcatcgaaaaaacgaaaaaagaaaacaacaaatcttctcgcgagtagcgacatggaaaagaatcccgctcgcacgcacgtaacacctccccatactaccctctaaggtctaagctccaaaaatccctaaaaacacatgatcttaaaaagaaaaaaaacaagctacaaacacacggtggcacattcgttatttatggaggtacggtgcccattgacgtaattccgcaccacacgccggcacccccaccccaaattcttgccgagacaactccctctcttccacgcctactcccggtttacgcggtttttctcactgacaacgtggggccacgcgtaccacggatggagtacagtccataagaccagttccagggaagaggatcaccatgaagggaagcttcctccctttgttgagtaaagcacagaaaaaagctcgccgtaatggcgacgcgaaagtaaacgttgcgccgacgacaccaccgtccgccgaccgaccaaaaacacatcgagctccgcggcatcgcgtccatccgcgatctccacgcgcgagcacaggatcaaacaagcggtctcgaatctgaactggatgccggagaggaagagccggtcccggttcgcaagcatccggctaggtcgatcgccggcggggctctcctcgtcgccgtcgcgacggcgtgggagcgggagcggagggcggagggttcggctggcggtgcgccccgcgccggcgtcgcggtcgctgccgcggcgggaggggagcagggccctcgcgcgctccgcgtccgagccggcgctcttgttgagcggcgggcgcgtccaccccgagccgcgggggctctccccgccgtccccgcctccgccgccgctggagcgtccgcacacctgcttcgacgtcttcaccccggactcccccttcggccgctccgcctccgccgcctccctgtccaactgcaatcccagggaggtacagaagtggactgttgttgttgttagccgcgcggttcgcgggagtgaattggctgggcttcgtttggtgcaggaatcaaaggtggtggtgagcgtgacagtcgaggggagcgtcgggcctgtgaaggcgatggttcggctgggtgcgagtgttggggaggcgatcgcagccgtggtggagaggtacgcgaaggaggggagaagcccacgtttggatccagctgccgcggaggccttccagctccaccactcccacttctgcctccagagtaagtcatttaacacgagccttcacattcgtcgcttaatatatgtcgaattgcacttgtgagtaagggtaaagtgaatctagtaagaaacgcatccaaaagctgttgcgcaccttaagggaacatagaactagaagaatggtatgcgaaactcaaaagaattgtagcattatttcgagtgaaatgaaattactgcaggtatatatgatagtttggctactactattattagtgaaaatttattcaggtcttcctgaacacagtaaaatgatgtgtagtatgaactttcaacttacaacccataattggttaaattatactgatgggtttatacggaacatagttaattatggaggttgcaggttttaatgccagtgtaatgatgctggtatccaacagttctttgtttacctgagtcctattatctcccacgttggaccatataaattactagttgttacatactaaaacatgaataagttcatgtttttctttacggaacaaaggatatgaacataagtgactagaaatgctttcgttgagcccaggtgactactcactattaagtcaaatttccaacattatcttgttaccttggtcgattgccaatacatagttgagtgatctgattatagaagtaaaagctgaatcttttgctggcaggtttgaacaaaaacgataagattggagacgtgggaggtagaaatttctacctacacaagaacgatggaaataacaggatttacctccaaagtgaagaatctggtacaaatttggttggtggtgaaattgcacacagctttggaggacaacagattgttgctataaaccacgaccagttctttgccattttcatcaagaagctagataaaattggcaggctgacaaaaaggatttggaggttactaacttgtaattgtacatgacctgaccctgtggatggtttggtaaggatccatccaagtagcagcttaagagtatagggtagagtataaatcttagcatcagtaaaccggtgtggtaccattatacttaggcctagcccaaaatctctcactgctgcaagcatctttcttcagattattaaccttgaagaggatgataggtgaaacacagtactagaggtttcaagcaccttcctactaagatgtcagctccttttatccgtagctgactgtgttgtggattacaagaagtgcaataggaaaacaaaatgggttaccaaaggctttgcatcagttttcgttttactcctacattgcttgctttgaatttttttttattacacggcagatgcacgtgcacgcacaacacactgcgtcatactcacactcccgtaaatgtgccctctaacatgcactcaaagatgaaaactagcggcacatcattgatctcactaaaattttgttgaaaactcacctgcatatccgtaatatttgttgaatttgtaagacttagaacagtttgcatgtagtttgaaactggacagagaagttcgttcattgcgcctgcagcttgttggttcacaactgaccccgattggaaatcaggtgttttcccaggattatgctcgacgtgttctgttcctgtgaaattatgcggttaacgaggccttcacgtaaacgtgaattcttttttgggaggccaactcctggtggatccaagcctattaacgtggcgcaaaggaaaaagtacgaattaaccccatgaactatcatggttgaccgaattacccccctaaacccaaaaacattgctccccctaaactttcaataccggacgaattacccccctcgacccaatccagagcggttttatccgatgtggtgtacgcgtggcactccagttagcattttctttttttaaatagtgggccccacctgtcatatatactctctcccctcttctttctcctcttcctctctctctagcattctcgccttcttggcgagcaaggcaatgcacggcggtgcgagtggcggtggttgggcgagtggtgccggttgcgggcgcggctaggcgagcggcggcgggtgggaggccttcacgtgggacaacccgaggaactgcctcgcccagccgcgccacccggtcacgcccttccgttccccttcttcctcaccccctaccctgcccccacctctaccccttcgtcggaccaccgccgccgccgctgacaccgacgacgacgcagctgtcgggtgaaatatctccccggcagtctcccgcgtcgatcgccctttcgttgcttccctttgtaatcgtggctgggaatgagtaggctctctctctgtattgattgatgagggttgatctcggaggagtggtgcgcgtttgggttggggagacggggggtaaggagagaggagggggaggaggaggaggaggggtggtggggagcgagcaggggatgcccgagagcgaaatgggcgacgacgacaccgacagcgtcgactacgccgcggagatggaggctgaagccgccagaaacggctcggtgtggtcagcggcgtacgcggcgcgggccggcgtctactgaacgtgctggtgaagcctagaggggggatggataggttgtcactgaaaacttaaaagcaaatcgcagcggtaaaattcaaacaaacccggaacttcctggtaaagaacaccggaacatccggtttgccaggctcggaacatccggtgttctaggacaggaacttccgggtaacaaaacaaaggatggaattcaaatttcgaaacaggagactaagccaatcttcacaagatggtgcacaggtattctgagcagagaatagatcacagaaacatccacagaaacatcacagaaagagacaagagcgatttttttcccgaagttcggatcttgcgatcctactctcccttgaggagctccaaagagctgggtctcaattaaccccttgcctcacttgtgcaaaaaccccagaggaaatccacagccttcaacgacaaacacccctaggcaaatttctagaattgattgaccaccaagatcccactcaacctacttctagaaattcgtcacaagtgtaggttgctctacttggaaaacctctagaatctcagcacaagaacttcattaacttacctagttccttttcggaggaggggagatcctttacaatcttacccgggacatccacaatatgcaacggattctcgcgggcgacacctaaccgtctaggagatcatctccaagagtaataagcaccgagatgacagctcacgagatattccaagtgctcacccaagatcctagtcttcacacctctccaaatcttcttctctccctctcaatctctctttctcacaagaattaggctctagattgagtggagaaggcaagaaacacttgggagagactagcaacagctcttggttcgaaaagtgaaagtggaatggccaaggaacgagttggttatgtataacagctaggtgacgtcatctagccattactcacaattttgaactggaaactagacaggaagttccggacctggaagatagtaacttctggactacacttaggaaaatctttttcacaagaccagaacttccggacctggaagacaggaagttccggacttgcacttttggacagatggagtatttgcaaaaatgactcctagggaaacttgacacttggttcacactaagagcacttgacatatctcagagcatcacctagaactcctcttaatagtacggtattccctaaaaactcgatttcaatagataaactatcctatgcacttctcgagttccggtccgctttgattttgtacttttggggggtctccaagcattcatcttccacaccttggaataatgcacctgaaagttactcaatgaactcattagtcccttaaccacatttgtcattaatcaccaaaacccattggggggaattaatgcactttcatctacgatggcgttgacccgttcgaggggatggagttcgacgacgaggagccgttgacgtgcacgccgtggtgcagacgcatccgtagttgtcggggatggacgcgacgccgttgacatggagctcgagagggcaccgcccgccgccaccgcgtcctcctgcgttgtgccgccgccccctgcataggcctcgtcaccgttgacgcggagctcgagatggcactgcccgccgctgccgcgtcctcccccgcgtcgccgtccaccgcgcatccccacgcgacaccgcccactgcccgtccacaccagtgtgcccgagctcgtccgcagctggctctctgagagagagagggaccgaacagagagagagggcgcttaggagagagaaagggaccagggagagagagagagggggagggagagatttgacaagtgggcccaaggagtctttttgctgactggattgccacgttagcgccacgtctgcaagctcaaaccaaaaccgcttagaacagtgtcgaggggggtaattcgtctggtattaaaagtttagggtgagcaatatctggcttttgggttcaggaggtaatttagtcgaccataacagttcagcggggtaattcgtactttttcctagctcaaaagcccggtggaaattttggtctagttttagagaaggaaaatgttctcttgaggcctctcatcttgtcatcgagtttcaaaatcatcacctgagtataatgcattcctatcttacaaaaccggattacatttggtcctaaggcggtattaaaggcagttttggatgatgtggcgctggcgtggcaataaaatcaaaaataaaaaaaagacccttgtgggacccacatatatcagtgaaacaatgtattcttccttatctctctccccattctttgatttctctcccacctcagtctcggcggcagcagatgtggaggcgcacttgtgcttcttcccagcccacttccttggccgttacgccgccaccgtctcctcaaatctcctcagtagcttggacaacataccctaccgctcccaccctctcatcccccacctctaggccatcgtcaccgccatgtactcctagctctccacccggccacatgtttggagaggtgagaggcgagggtagtcaattaagcccatctttcgtgaaaagaaaaacggaagtccgtctattcagtagtatgaaatgttgccttcactcccccatccctatacgaactgggctatgttcggtacccagttgtcccaacttcacctctctcgtttatcgtgcgcacgtttcccaaactattaaacggtatattctttgcaaaaatttctatagaaaagttgttttaaaaatcatattaatctatttttaagtttttttagctaatacttaattaatagtgctctaatatatcgttctgttttccatgcatggaagattagttcccaaacccatttaccgaacacaaccttaatttttttatgtatgtgaactaacacttgagttttgctgcaggttcttgaagcagaggcgttgtactcatcaaaggaaaaaaaaagattaaggcatttcagtttaatcattcttggctcaaggtgaggaattgaataattgtccaaagtttcaagcattggagtccctcaggaggccaagttcccagaagtctttgaccccaacttagagagctgatgaagaagatgatggtagcaagagtacaactcctaattcattacaaccgaatgataaaaaagagaccaacatgtagaaagcaagtaaaggagaatttgaagaatggaggagaagctggaccatacaaggaggcgatgaaagatttgcttgatgtcaaagagaaataaggatttgagagaagagagatggaaggagaccaagggtgtgttcggcaccctcttttcccaactcttctccctcgttttccgcacgcacgcttttcaaactgctaaacgatgcgtttttttgcaaaaaagtttctatatgaaagttgcttaaaaaaaatcaaattaatccagttttgaaaaaaaagctaatacttaattaatcacgtgctaatggatcgctccattttccgtgcgggagggattagttcccatcccctaaaaccgaacacaacctaaggagattcaagagcgcaagctctcattcgctaagcataagatagtgtgggagcaagaacagaaaatcatgttctgtgatgtctccaccttggaacagatgtgagaacatatgtgttggccatgaggacacaaattgttgcttcaaaggtggctgccctcaatggccaatttggtagtggtagtagtgtctttggaggtgaatttggtagtggtaatgaagaagtttgagctcctcgatggaatatgtttgatcttattggatgatccatgtgtcgtttggtaataggatatgtcgcttccataattggtctttggggtttctatttgttaagttccacaatgatctatatgtcatttgctagtaaatatattgtttttaaatttgttattcccattgttgaaccattcatgcttgtacgatatgcttttttttattatataatgcttgtgaacttatatgcatgtgtttttggaaattgaattttgttatgaattttgcaatgttggaaattttgaatttaattttaagttgtgttcgaaatatttatatttatattattgtggtgttaaactagacataaatatagagtataagttgaaatgtaagaaaaagaaataagggttgttgctaaagttgaagacattttctggttgtgaagaaatgggggaaacctccaattcactaatggggactttaaaatgggtactattgctaaagatgcttgggctctactggaactcgtttttttcccataaccctcaggtgctgtatagggaccatgtttagcaaaattttcaattagtgaccttttgggggaatccaactaacttcgtatggcaaataagaaattatcttttccttttcaatttaggtctgcctttatcccttctttagtgtccacaagctgcaattaagactctaaagctgaaaccttagtgtgccacatcatcacaaattttgagccattggatcaaagagatcatgtcacctttccgccgtagaatcaatgagattaagcatgaaaaaaaaggaaaaacatccagcacaccccaggttgaggcccatagattgctccatccactgctggagaagtgatctttgctaggtcggctgatttcgacaatagtctcggttctaataagaaccgggaccaaaaattgtttttagtcccaattaaaaaaaatttgatctttagtcccggttggtattaccaactgttagaggcctgtcagggggccaaggatcttagtaccaaccgggactaaagatcaccacttcagtcccggttggtacaccggttggttgtaccaaccgggagtaaagattatttagatccttaatcctggttggtaataccaactgggactaaaattcaacccatagttgttaacgaccaaatttggtaatctaagaatcggagatgaagaaggaatcgagatggagttcgagatggagatcgtcccggaaacagagtgaagatcggctggagtccgaatcggctacgactaagatcggcagaattcgagtcggacagggttagccgatcaagccggatccgataatataacattgcatatgttgtcgggttaggttgatatgcttcatgatgattgccacgcatggatagagtcctgagaaggcagttgtatctattaattaggatattttatgtaattctcttagagatatgtttgggcaaaagtctgccacaaagacttatggtatcttagagtgtgttagagataagagtcgtgtccgatatggacatattttgtaattctcgggtataaatagaccccgagccccatgtaatcaaactaacacacggtcaatacaatctcggcgcatcgccaccctttttactttcgttttgtttcgatgagttcttgcttttgggttgagctgcatcggttttgatcttcaacaagaggtaaaacttattatggcggcttgcgttctcgggattagtgcttccatctttatgatactcaaatcttgtttatgtaattgtcgagttatcacatatcatacataatctccggcaatatcgttacctaacctacaatcggctaacatctgttagtagaaggcagccgattaggatagatactgatgttgacttagattatatatgatatccaccactttatgacacatccaacggcttgattgtctagatattgtctttcttttcatacttgtagctacatcagttgagtttgatcatatgagtcgtgattagaatctcaatctctagcctgtctttggttgccaactagggtagtatcggactttcagccaatcttacctgatttaactatatttaccttatatgctttgttgacatgttaaatctgccctttatgttaagatcttattggatttaagtatattaggcctttgtttgatatattctacttgctttaatatcttaatatagggtagtatcggagtattagccgatacatgctagatctatctgatcggctatgctatgaacatatatagtctcattattaatatatatttcgatctaagtgatttatactgtctcggcatggtgaccgatctatcccaatcgcttgatttaagtatatatcgatatagggactatatactgttaatatctacagccgatcaagtagatgtagttctttcttacttattaacgactgccgatcgatgcatatatgacatcggctcaaagataaaggatatgtcatcggcatctagccgatcggctatcgtttatggatttaaccgtggtttctttgtctttgtttcttgttgattgcaggatcaaatcaactggcacgctcgcatacccaaaggcaagttttggacctgcactggagttaagcagatctcctaggcctcaagtttttacatcaacacgcttttggcacgcccagtgggaccgattagaagtcagaatcacaacagcgttttctcatggttgagaaaccaccagcatcaccatcttcggctggtagagatggttcttccaaatctaggatcccgaagcttggtgcatctgaagttaatgagagcaacatagtgcccatcactttggacaaattgacgcccgaacagaagaaggatcttgaggcaatgatgcagcaaacatagagccaattcttgaactcattcatggagactcgccaaggaacaattgttctgaggtataagatgaagttagttgctgatgttcctgggacaagctcttccaaggatggagaagtacagcaagttccagatggtactactcaatcaggtgataaaggtgctgcagatggttctcaaggggttcagggtgatggttctcaaggagtttaaggtgatggttctcagggatttcaaggtgagaatcttaaccaagatggcaacacggcacagctatagtttaactacttccaagatcggattgactatgccgtgcaacatgctttgattaatcaatctggggtgttagtcaacactttgtcaaacatggtgaagtcgatggttgatggctcaatagatgaatatcaggctacaggaccggtttatttgccaggaggtgttttcccaaactatcggcccttgatcactaataatcagcgagctgttcagccaattcctcccaatgcaccatcggctcagccgacagcaccagtatcggctcctgcaccaactgcaccatcatcggcaccaggtcagctaattaatcctcggttgctggtgagagagcagccacaacatagtggacaaaatgtgaatcggctaactcaagaccaagtcacagctatgttcttaccagctcagcctattgttgacccaatccaacaacagccgattcaacagacgccaccaaggcagcaggttgtgcagccaattcaacaaacaccaccaagacagtaggttgtgtagccgattcagcaaacgccaccgagacaacaggttgttcagccgattcagcagtaaggtttgatgaatgcatcggctgggttcggaacacctgacaatcagctaaggcagcacgctgtgaatagtgttgtcccagagcatttggttcataatgtgcaaccagattaaacggtgatacctcaagttattcccgaacatttggtgcgcaatatacaaccaaactttcagaattatcaggggggcaatttgaattatcagtattagcctccatcgccgcaaattcaatatcagcaaggaggatcggctcagtctcagttcactcctcaatacaatcaattcgagcccgtgccacaacaagcacaggggtgcctcagcaacgaccatgggccgatatgattgcagatgtgatgagagaacagtttgggcttaagcctcaggatgctggaaatctgtatcggcatccataccctgagtggtttgagagagttccattgccaaaccgattcaaggttccagatttttcaaaattctcggggcgggatagtgcttcaacatatgaacacgttagccgattcttagctcggtgtggtgaagcatcggctgtggatgccttgagggttaggttatttccattgtctttgtctggatcggctttcacttggttttcttctttgccatgtggatcaatcaacagttgggccgatttggagaagcatttttatagctatttctatagtggggttcatgagatgaaattgtctgatttaacggcgattaagcaaagacatgatgaacctgtgcaagattacatccaaaggtttagggagatgaggaataaatgctacagcttgagtttaactgatgcccagttagccgatttggcttttcagggtatgatagctccgatcagggagaagttctcgtcccaatactttgatagtttgtcacatcttgcacagaaggtaaccttgcatgaacagaggtttgcagaagccaggaagaactttgaaaaggttaatcatgtctgtccttacatatatggatcggatgatgatgatgatgactccgaaatagcagcagccgaatgggttagaagcaagaaggttataccatgccaatgggtgaagagttctggaaaggaagagaggtatgactttgatatcaccaaggccgataagatctttgatttgctactttcggaaaaacagattcaacttcctactggtcatacaatcccatcggctgaggagttaggcaagaggaggtattgcaagtggcataattctgggtctcattctaccaatgattgcaaagtcttcagacagcagatccaggcggctattgaaggaggcaagatcaaatttgatgattccaagaggccgatgaaggttgatggcaatccttttcctgtcaatgtggtagaggttttcaggtgaattcggctaaaattatcaataaatatcagaagaaatatgacaagcagcaggagaggcattatgaagaagatgatggcggctttgatcctcattggggttgtgagttctttagattttgctggaatgaaggtatgaggttgccatctattgaagactgtcctgggtgcagtaatgttgcagaaagtccaagccgatcgtataatagaggcaattggctaaggcaaacaagagttcctgttcatcaaagattgggcccagtgaaccaagatcgtggccaggagggtgatgaagacaggaagactcaatggtgtccttccggtatttttacaaagaatcagaagagaagggttcaaaggttgaggaacagggaacgcttttaggaggttgagcaagaaatcaaccatcggctgaagaagacgaagccaaagcaggagtggcgcgttaagaatcaagtgcctacagctgatgaagccacagtcgatgaagcaaagaggttggctaaaggaaaaagtgttgtgactgcatcggttaacatggttttcacactccctgcggaatttgggatcaagcaagtcgatgttgatgaagttgaggaagaatcggctaaattgattttatcaccagaacaagcagtctttgagaaaccagaagggacggagaatcggcatcttaagccattgtatgtaaatggttatgtcaatgggaagccgatgtctaagatgatggtcgatggtggggctgcagtaaatttgatgccttatgctacatttaggaagctaggcaaaaatgctgaggatctcatcaagacaaacatggtgctcaaagattttggtggcaatccatcagaaaccaaaggagttttgaatgtagagctgacagtcggcagcaagactatccctacaacattttttgtcattgatgggaagggttcctacagcttgttgctcggaagggattggattcatgccaattgttgtattccttcaaccatgcatcaatgcttgattcagtggcaaggcgacaagattgaaatcgtgccagccgacaggtcagtcaacgttgccaatgccaatttagctctttgggagatggatggtctcgatttcttatctagaaaagtttgggatggagattttctaaaagtgtccgattgtgatatacagccaattgaagatggagagcccaagctattattttgagggcgtcgtggagggttcaaacgtctgcactaaggacacagtagatgatctcgatgacaagcaaagacagggtttcatgtcggccgatgatttggaaggaattgatataggtccaggcgatcgaccaaggccgacatttatcagtaagaacttttctccagaatttagaaccaagttgatagagctcttaaagaaattcagagattggttttttcgggagtattatgagatgccaggactcagccgatcgattgttgaacatcggctacctatcaaaccaggagttagaccacatcaacagcctccgagaagatgcaaagccgatatgctcgaacctgtcaaggctgagattaaacgtttatatgatgttggttttattcgtccttgctgatatgccgagtgagtttctagtatagttcctgttatcaagaaaaacggcaaggttagggtgtgcattgacgtcagggatttaaacaaagctactctaaaagataagtatccaatgccagtagccgatcagttggttgatgctgcttcagggcacaagatattgagttttatggatggaaatgcaggatacaatcagatttttatggccgaagaggatatccataaaacggctttttggtgtcctggtgcaatcggcttgtttgagtgggttttaatgacttttggcttgaaaagtgctggagctacgtatcaaagaaccatgaattatatatatcatgatctaatcggctggttggttgaagtctacattgatgatgtggttataagtctaaagagatagaggaccacatagccgatttgaggaaggtttttgagagaactaggaaatatggtttgaagatgaacccgacaaagtgtgctttcggtgtatttgctggccagtttttgggatttcatgttcatgagagagggattgaggtgactcaaaggagtgttaatgcaatcaagaaaatccagcctccagagaacaagatagaattgcaagagatgatcagtaaaataaattttgttagaagatttatctctaaatattctggaagattagagtcttttacaccattattaagattgaaagctgatcaaaagtttacttggggggcagagcagcagaaggctttggataatattaaggaatatcttagctctcctctagttttaattcctgcacagaagggaataccctttaggttatacctatcggccggtgagaagttaatcggctcagtcttgattcaagaactggaaggaaaagaaagagttgtactctatctaagtcgtcggctcttggatgcagaaacgagatattcccctatggagaagttgtgtttgtgcttattttttcctgtacaaggttaaggcattatttattgtccaatgaatgcactgttatatgcaaagccgatgtcgttaagtgcatgttatcggctccaattttgaaaggaagggttggaaagtggatattttccttaacagagtttgatcttcggtatgagtcactaaaggcagtcaaggggcaagctatagccgattttatcgttgatcatcgtgatgattcaatcggctcagttgaggttgtgccatggactttgttctttgatggatcagtatgtactcatggttgtggtgtcggcttggttataatttctgctcggggggcaagttttgagtttgcttatactattaaaccttatgcaactaacaatcagactgagtatgaggtagttctcaaagggttgcagttactcaaggaagttgaagccgatgctattgagattatgggagattctttgctagtgatcagtcaattggcaggggagtataactgcaaaaatgatacattgatggtttataatgagaagtgccgagaattgatgaaagagtttcggctggtgactttgaagcatgtatctcgagagcagaatattgatgttaatgatttggcccaagggacttcgggatataagccgatgatcaaagatgtcaaaattgaggttgctgcattaacagccgatgattggagatatgatgtacattaatatttacagaatccatctcaatcggcttctcggaaatcgcgatatagagcgttgaagtatactttattggatgatgaactctattatcggacgattgatggggtgttacttaagtgtttgagtgccgatcaagctaaggttgcagtcggtgagcttcatgaaggcatttgtggcactcatcaatcggctcataagatgaagtgattgcttcgacgtgcagggtatttttggctgacaatgctggaggattgttttaaatattataagggatgtcaagattgtcaaaaatttggagcaattcagagggcaccggcatcagctatgaatcctatcattaaaccatggccatttagaggttggggaattgatatgatcggtatgattaatccaccatcgagtaaagggcataagtttatattggtggcaatcgattattttaccaagtgggtagagtcgattgctttgaagaaggttgattctggggatgctatacaatttgttcaagagcatataatctatcgatttggtattcctcaaactattacaaccgatcaaggttcaatcttcatgtccgatgagtttgttcagtttgccgatagcatgggtatcaaattgttgaattcttcaccatattatgcacaagctaatgggcaagccgacgcatctaacaagagtttgatcaaattgattaagagaaagatttctgattatcctcggcagtggcatactcgattggccgaagcgttgtggtcttatcggatggcttgtcatggatcgatccaagtccctccttataagcttgtctacggagatgaggccgttttaccatgggaagttagaatcggctcaagaagaacggagttgcaaaatgatttgacagctgatgaatattataatctcatggccgatgaaagagaagacttggttcagccaagattaagaacccttgccaaggttaccaaggataaggagcgagttgctcgacattataacaagaaagtggtactcaagtctttttcggaaggagaacttgtatgaaaattgattttgccgattgggactcgggataacaaattcggcaagtggtcaccgaattgggaaggaccatttcaaatctataaggttgtgtcaaagggagcttacatgttgcaaggactcgatggagaagtctatggacgagcgctaaatgacaaatacttgaagaaatattacccaagtgtttgggttaatgcatgatcggctggtgttgccaaaacatgatagccaatgtattcacatcgccttgagatggccgatattgttatatcgccctccgttttttttattgtaatcggttttggtttgccgatgtacggccgatattgttatatcgcccttagttcaaattataattttatcaatgcttttgacattgtaaaattagggggtcacatatatgcaaaattgcaaatttttgagcaaaattatggagttatattgaatcggcataaagattatcaagatgagttagatgaagagccagagtttcttagccgattacaaaaattcctagagtctattacacaaaatgtcattgagacagatagcgctggatagccgacaaagcccgttgcctgatttgatctatttcttcgatggcttggatgtcttgggcgttggttccagggatgatcttgagagatttagtcgtgtcagccacattcttgatagccgatctcagtctggacttctgttcttcaacggcacttggaagattggctagcttttgtttttcatgatccagttcagcgttgcattcctcaagttgagctattagattaattttgcgagcttcaagccaatctatattcaactgaatcggcccaacagagagttgatctaacttggctttctcttcatgcatgagctgccgattggattgaatagtgacttcgatattcatccgctctcgccgatcgtctatatgttgcttagccttttccagctcaaattggtgttgctcaaggaatactgctagagtaatggtgtttgccaaatcgtctgggatcagggcttggatttctgcaaatcgtgcccgaattgaaccacagtcggctaccagattgtctaatgaagactctagccgaagggatatatcttcaagtgttttcttgatatgtcatccaagggggctagagccttgcttgtggtttcttcttctacctcatcaaagtagtccttgatgtcaaaagagaatagatcggctaaaacctacaagaacaatttcaagagagttaggagctaaatagacatagccaatctaagttcttgtatcaaagggaaacttacttggatagcaggggcagctggttgttcttcttcttcaacataatggctccctgtagccgatggagtttggttacttggtgattgttgtacaggggaagaaggaggagcaggaggctgcaaaaagagataaatgttaagataagattggctatgatcggctaatgagaaattaagaacatcttactggtggagccggtttgagagttgttgttgccgatttcttcttcacggcaattctttttttctgcaaagacaagattagtaaataatcggttgaggataaaatagttataaaagggaatcaaggaaagatatttaccctagagaagtgagctggagcagagggagtcagaggaatttgtttaggtgaagccgatggagttctttctgtatcacttacctcagctgcagcttcatcaacatcctctttgatctctcgttcatccaaagcttgctcaatggatggatctagggcagacagatcatcagttgacttggtcttctttgacttggttttcttctttggagccagagtcgatgtgtctacaaatgatgctctggtttttctctttttgccagcatcggctagttctctaatgagcccttggagaagagttgaagtcttgggggcatgatagccgatgacagggggagatggtccacctccatttggaattagacttggggcatatttgatatctttgccgctattgctttggtgtggaggggaagattctgttgtctgcaaaatagaagaaaagattagtcaagttatgaatcggttgacaattattcaaatgaaattaatgaggttaaggtttacctcaggtataacatcaagaaagagatctgtcatatacattgaggccggttggtggaacagatgcagcttccattcaccccatcatctgtcaaagtttctgctcctaaatcttgccagctctatattttcaatgctgcccagaggaggtccttggagattgagcagctgatccatcatcaaggttgatgaaatttcctctcggcattggattttatcagcaaagaacaagccgattggtagttgacccatcccaagttgtctggcagagctcatcgggtgataaaattcataagaaacctgaatattcctcccttgatgtatgccgataggaagaatgcatgggctaattgcagctgagaagacttctctagatttttgaaatttttcatggttgatatcttcaaatctgaagtctgatgggaggtcaagatgcattgaatcttcataaggaaaccaaactcgagcatcgttttgaaagtcctcataaaaactacagaaccaatctttgagcaattcagccaataattttgctccagcatcggctggtgtggatgcatattctccatatgacatgcatctacgatgggtgcgctcttcttcatcatcttctacaatcggctctagcctagggaatacagcttctgtcatagatagccgattgacgactttcatgaccatcaggttgagccaagattttagcagctaccatggtccacctgctccaaccgctgagccgacatctatcttggccgatgcattgttcagcatttggtataagtagccgaggaggatcttgcctaaaggaaattctctttttgattccagagcctcggctgcaaactgccagttggttgcaggaccacaactggatccacagaaaaggaacttttctagtcacatgagcaagaaggccacatgttctcgaggagtaatggatccctggcccatatatgccgccacataactagaccaaccacctatactcttggtcctgaagtcgtactgattcttggtgttcagattcatgggattagctgacgaggacacgtccagaccagtaatcatggtgatatctattagggttggtgtcatcggcccttgattgaacaaaaaggcattgatggtattagacagaagtatgtggcagcggccattaagtgttcatctttggctgaattcgctgtggtgagggcaagtgcttcgccgattccaatctcgtcccaatgagtttgcttgctagccaatacacgcttgtaccatgtaatctagcttttctcgggtggagttttgtcacggcctgaatttccgtttcaggatttataaattaattaataaattattattagaatttatattaaaagtacattaatttacaagtgaagttaaatgtgggaaataaaattttctaaatataaagaatggttggatttaatttttattaaattctccatgattaattatactctctggaattttctcgaattttttcagagctcaattcctaatgttaataatgcaaagaacatttcagtaattattcacatattaaattaatcattaaatgagctggtttcaattttgttaaatacttagagtgtccaagtatgttcaagatttttcttggaattatttgagcattggaagtatttttaacaattgaaagatcatcttattggttaatttatttggaaaagcaataaaatcttccttcctagtcttgggccgaattcagcccattccctcctctcctctcagcccgcagagaagtctgtttgacctccctgacgctacagtactctatcttcaacctccagacagagcccgagccgtcccgagcctgtgcagccgtgccgcctcctcccactaatccggccacctcgttgcccctttttccaaattagttgtgggaatggaatcctctcaatctcctcttccttttccccaagaaatcccacaagtttctatggaaatcctttccaatttcgcggatcaatctttcctttttccggcgaagatcctaaactttcccgagtttttcccgtcgacgtgggctcgatccctgggctcccatggctatatatagagcccgctccttctcctctttcggccgccacctctccctatctccaccgtcgccggaaacactctccccgcgagctccctctctctccacctccggccgccgctccagccgccgtgcgccatcgccccgaccgtcgccggtcagcgcgaccacctccctcggctccgcaaagtcgagctccaccccggccattggttcctttgtgccaaatcccgccggaagccgcttgccgacgcgaaccagaaggtttcggcctttgctgcgcctccagccgcagctagcagccgccttagccgcctctttcggtcgccgtcgactccattgggttcgcaggagcaaggtgaagcccggccaccggtttttctttgccaaagattgcagaaacgtcgctgccgtcgctgacccgtccccgtcgccgcctctacctcgctgccggccgtctgccgtcatcatccatcgtcacgctgcccctcagtgagctttcctctctcctttgtcgttcatcggtgtagtttatccatagggtcttaatccaatctaatctaatttggccctagtgtcgtcatcatcttcatgtgttgtcgccggaaaatcatcgccgccgtggacagtacctcgccgcccttcgaagctcatcgccggccatcttccgtcgctgtccatcgtcgcgtaagtgttggtaagaatcgccgtcgccttctctacctcccggtgccctccgtttgcattattgggccatggttcgccggcaaccgccgctcctatgtcgttcactggtgtagtttatccctagggtcttaatcccatctaatctaatctaatcttgtttggccctagtgtcgtcatcgtctccgtgtgttgtcgccggaccgtcatcgtcgacccttcctctccgatcgctttggttcggtgagacgtctatctgtgttccctcggtttagtttttaatctctcgtttgtgtcgtcgagtagccgccgccgtgccacgcttagctgctgcgccttgctttcgtgctctgtcgtcgttgtgtgtcgtcgtcgctgtgccgttgccctaaccctagccgcgtgcctccgccgagtcgccgccgcctagccaagccaagtcgccctagtgccgccgtgtcgcagctgtgtgccgctttaacctagctgccgctttaaccgttgctcggtagtcaagttgtctagccgtaggtgcatccctaaattcctaccggcctatcgtttgccgtacccgggctttaccgtgaatcgtgtctagctcaccggtttagtcgcagtcgttgttaagtcgttcgctcgttcgttcgaaagaggtgttccccgtgcttcgttcgttcgtccatgttgagtcgtcctttagtttagagccgttcagagccgccggttccgttcgccggtttcggttgatcatttgggtgatcccgtgtcacgtagaattgactcgttgagtcggtatctcttgaggcttgcttgccagattaatctaatccgatcttggtcgactcggtcaagattaatctcagccatataaatccgttccctctcttcaatggcatattagttctttttatcatatgtcatctaccaaatataatctaatcttttctggaggttgttttaatctttatctcagttataaatcatttgtaaacggtttaattaattttgaatagtcttttctttaataggattaattggaattaaatcttgtaaaattcataattaatttatatgatattgaatgaggccgttcaagtctctaaattcatctaaaatcatgatctacatgtttgtttactttatatgtactgtttatttggtttttattagtctttttcttcgttttgcgtgttagcttgtcgtttccgtcgttgcgaaggttcgcgagtacatcggaagtattccagaagattaattgaagaccgattattgcaaggcaagtcacacagatcccaaacacaattcctttgagcatgttgatcctatatttaaattctctatttatttcaactgtgtatttattttcgaatgtcaccgggtggtgagcctttcccatttaattagggccaaagatgactttattttcctatgggttataatttgattagctagaaccttatatattggtttggttcagctagatgcttataatagatgcttagccatgcttagaaacaataactcactaatgggataaatcatgcttcactatcacttatggatatttaatggaagctcacgatggtcaatcgtgattggttaattaattatttgccaattaaaacctgataatggtgggttgtgagcacatggttttaatggtcgtgctaatgacaattaaggaccggttcacgagtatcggttgtgaaacattaaccgtgccatccacaagccagcgtgggcaacgactttactttttgtatagcatggttcattgcggagcaccagactgagaagtgacggagataagcccatgggggtcgctgggagtctatgccttgtttataagggggtgattatgatccaggaacgatgcactgctttgagttgtgttgtgcgaagggtacagtcacgatttccccctttgcagtgccgtggtggtacttcagggcatggtaacatgtgtggaatcgtgtcttgtggatacagtggtacacctctggccagagtaaaactattcgaataattgtgcccgcggttatgggcgggtctaacaatgtcttttgtgattagtctcacacttctcaccataatgaatgatgctataactagtaataatttgattagctcctggtttggaatggtacattcctggtttggagatagatctgtacagccgggtatggttgttcaggatggttgggcctgtgcagcgttgttcagtgttgattaatattgatgattaattactctactgttttacaattcttaactgtttgctaaatgctgcttttgcaaatgagccctatattatgccattctttggtatccttgtgcacttgcatatttgttgtgtggtttgctgagtatgtcatatgctcaccttgcaataatcaatcaaacctcagttgaagacaagttgcgaaggagaagacgtttggcttataccccagttgagctgcctgtgggagtggagccggagcttcgctagaccgtaattccgctgcagttttcttttcttttgtaagtatgtaacgttatttttatgatgaatctgtatattaaattgtcagtttgtgtacctcggctgattcctggacgaggcttttatgcacaaataagttcgggaattactagtgaatttctgggcttgacaaatatcacccctaagtttctaggttgggggtggggagtgactgggggtgccaatgtggatagctcggcccctgctcggaggattttcacagacaagttttttcaagagatggccaagacttgaaggtgctcttccaatgacctagattagggttggccaatttgaaagggattctattggtttcgccaatgatgaaatcagtagggtcgagattgccgatcagaccaaggaaataatgtctctcatgcgatagacttggaattgcaactagattggaaatgtgctacgaatccagaaggaatagagaagaaaacaagatgagatgaggaaaaccaatctactgtgcagaaaagagggatctgctgatgggcacatacctcagcgtattcggctgatggcgcggtagacgggctggtggaggtcgacatcgccgcgggcggaaatttggccggagaagagatcacctagaaatcgctttgtgcaccgaggggatcaccggagagagataggacggagtttgcttcggcggtgaaaacagaggaaacggtgtgagatttctcggggacaacggttagtatttaaagcgctgaataatggttggaaaacgacaagcgcaagattctctcggaattgatgtatggcaaattcgaaacattatccaatattccggacttggggggcatgtgttaacgaccaaatttggtaatccaagaatcggagatgaagaaggaatcgagatggagttcgagatggagatcgtcccggaaacagagtgaagatcggctggagtccaaatcggctacgactaagattggcagaattcgagtcggacggggttagccgatcaagccggatccgataatataacattgcatatgttgtcgggttaggttgatatgcttcatgatgattgccacgcatggatagagtcctaagaaggtagttgtatctattaattttatgtaattctcttagagatatgtttgggcaaaagtatgccgcaaagacttatggtatcttagagtttgttagagataagaatcgtatccgatatggacatattttgtaattctcgggtataaatagaccccaagccccatgtaatcaaactaacgcgttcaatacaatctcagcgcatcgccaccctttttactttcgttttgtttcgacgagttcttgctttcgggttgagctgcatcggttttttttaagagaacatagcaggggaggcccccgctgttagaaaaactttattaagaaaacaagaacaaagttacaacccattaatccaacttatgattacatcgtgatatctcgcacaaattctaaacaatagaaggaagaggtcacccttaaagagttgcctccaagtgatgaaagaagggatcttttgctaaaaaatgaacccatttctttgcttccatatatgccaagcaacataaaggaatttctccatgaaacagctcccctgataatccaatttagcccttataaacattgcttccaacgacagagtagtatcccatgtaatgcctagaagactccaacaattttgggcaaacgggcataaaaggaacagatgcatgaggtcttcaacagctgccgattgacaaagaacacaagaaacatcacaatccggaggagcacaattcttatgatccagcatgaacttggtgtttaatctattcatcatgagtagccacccaaaaacctgctttgcacttccataaccatagaaaatgaactggtggcttaataactctgaaattcagggcatagaatttttgtgaagaatatttcatatttccccaaatgtaagaccaaacatagaaaatgagctgcatcggttttgatcttcaacaagaggtaaaacttgttatagcggcttgcattctcaggattagtgcttccatctttatgatactctaaccttgtttatgtaattcgtcgagttatcatatatcatacataatctccggcaatatcgttacctaacctacaatcggctaacatctgttagtagaaggcagccgattaggatagatactaatgttgacttagattatatatgatatccaccactctatgacacatccaacggcttgattgtctagatattgtctttcttttcatacttgtagctgcatcagttgagtttgatcttatgagtcgtgattagaatctcaatctctagcctgtctttggttgccgactagggtagtatcggagttacagccgatcttacctgattttactatatttaccttatatgctttgttgacatgttaaatctgccctttatgttaagatcttattgcatttaagtatattaggcctttgtttgatatattctacttgttttaatatcttaatatagagtagtatcggagtattagccgatacatgctagatctacctgatcggctatgctatgaacatatatagtctcattattaatatatatttcgatctaattgatttatactgtctcggcatggtgaccgatctatcccaatcacttgatttaagtatatatcgatatagggactatatactgttaatatctacaaccgatcaagtagatatagttctttcttacttattaacgactgccgatcgatgtatatatgacatgggctcaaagataaatgatatgtcatcggcatctagccgatcggctatcgtttatggatttaactaccggttgctttgtctttgtttcttgttgattgcaggatcaaatcaactggcacgctcgcatacctaaaggcaagttttggacctgcactggagttaagcagatctcccaggcctcgtgtttttacatcaacagtagtatataatccctaggacttatcctcaaatcctctatcggaaagtctttctccccatcttgagtggcggatgcaggtttaaaatacagatggggcgacagagctagccttaattaggtaatggcacaacacacacaaaccatagtcgctggttcacggcattggcgcaaaagcgcacagcacgaacatcgagaaagttaataacaaagattgatagtcgaacaaatgtatatgacttgtatgtagagagataaaaaaatgagaaatactgttagacaataaggggaaccactttcaatagttcgtaggtataaaacgagatgaaaaattatgtaggggtttaagtgcttcgtcaaaatagttcaagtgagtaaaattgatttttttatatatttaccaatttaattatttactgtaaactgtattatacgctaaagaaatagaaagaaaatcaaattttatgtatggccaaaatcagaaacagtcaaattggtactacttatacacgaattttcataaatgtttttgttcctacttaaaatacttgatttacctgattattcaatagtagattgatgattaatgtgttagaaataggactaaaatgaggtttggagagtgtggagcgacacggaccgtagctgggtcggccgacccccctacctaatggttgtgtctgccactgccatcttcctcctctctccctctcctctccctctcctctctctcttatcctctcctcttttcttgctcttatctactctttccttgcagaggcagtagcgtatcggcggaggcagtcggcacggcacggaggacgggcgcggcgcggcagcggcgggccggtgcggcaggcgggaagcacctctgagtttttctctttttttgagatttttatttcggatctgcaatgtatttgatttgtgtgtgatgtgatgaatatattatgtatttgtgatgaattttttagaacttgtgatgtaatttttttaagaatttgtgatgtatttggagatgatcgatttgaggatttggagaggatccttttgatctatgatgtgatgatcaatttgggatttgtttgggatgatttgggaatggagtgaaatcaatattcaatgttaaaaataatgaaaaaaaaaggagcaactggacctagcctggcttcattttagtcccggttggtgttaccaaccggactaaaaatggatttttactcccagttaccaaccggactaaaaatggatttttactcccagttacggttgtataaccgggaatatagggggttcataaccgggagagaagagccattttccagtagtgatcctgtgcaacagaagcccaccaagtgtctttttttatatatagaaaacagtaggagaggctcctactacgctatattaataatagggaaaattacatagcacatgggataggggaaaacgaaaaaagttgagacccataactgcaattggatttttttttcttgtacatggcctgcaattgtaccggtgtttatggtattggttcatggcgagcatggttggggaaggccacagctgaaacggccgataggcggagccctatgtgacacacgacctggtgctcgatcaacggcgggcgaaagcttggtctatcacacggctcaggagaaaggtggaacacgcttcgacgctcgatggtgtgaaacacagttcgggagggcaaggcggctggcctttctagatggctccagctgccaggttacccaccatggacatcaaggtttgcctgatctcaaccggcccctccctcgtcgtctttcccaacccatgccttaaaccttgcttctctccattccccttaacttgtaacccacaccctaatcatcttgatcctgtatgctcctctagctccctcttaatcatgagcaattacactatagaaactgctaaaatcaattgggacaacaggcacaatggttagtccttaattatgtgcctcttgaagtttctgttcatgattttcttctaattaatttccttcatgagccttttgcagtacctcctacaaccgtagtagttctcaaatccaaaccttcggccacatcgtgaacacatcttgcaggtagggatggcaacggggccatccccaacggatagtgctaccccgcccccgtccccggacacttcaaaaagccccgctccccgtccccgtccccggcctcggggctgacttttcgccgtccccgtccccaactgggttctcggggccctattgccatccttatatatgtctagattcattaacatcaatatgaatgtggaaaatgctagaatgacttacattgtgaaacggaggaagtagaaaagagaaaaaatgttttagggagaaaaaaacagaaaaaaatggaaaaaagaaagagagagatcgggaggagggaggggaggggaagcgagagaggggggatcgggagggctggaggagggagggagggatacggatgagaagggtaggggggtgtagaatagtcttacccctatatatatatatatatatatatatatataagtaacttatataagttattagcaaagttttctctctgataaatcttcccttgggattaaacaaatacgataccttggaatacttccgggtgaaatgctacaatggtatatccgtgcgcttgcagattactactgtaaccataaatataccagggctatttctgcactattgctaggaattcatatttctagtaatgttgttaagaaataccaacaattagctctctaatttggccttgcagtaatgatcctagtggtgaagcactgaagctgatgagagatggaattatttgtcctgatggcatcaaagctagagcctacgctattgactgtccgctattgttggtggctggagtataagaatcgacaacctgtaaattattaagttcgcatttgagaagaggatgcaaaaataaggaataaaagtaatatgattttacctggggcctgatagaatcatcaattatggttaagtagaaactggatctcaagatgaaaagatgtttctcccattcaatccaccattggtcaaacaaacagctacgcatgggatggacatcaatgtcaacaagagaacctaaggtgggtccttcaatgctgagtagtcgatcaaacagaagagctgaagtcactattccttatggttaagtagaaactggatctcaagatgaaaagatgtttcttccattcaatccaccattggtcaaacaaacagctacgcatgggatggacattaatgtcaacaagagaacctaagatgggtccttcaatgctgagcagtcgatcaaacagaagagctgaagtcactattcctctagtttgaatttttctcgagaagtgcagaccgactgggagttgaccagatcctcgttgtctagatgccaccattggatgataaaattcataagaaacttcaaagtatcagccggtggatatgccagttggacggatgcagggtgaaatagccgatatgaatgtatctcaaattattgcttgggagttcataagaactgaaatcagtgtaagggtactagattttggtagttctagggaaaccatcatagaaatggtccttcggaatccttcggccgatggtcccgatccaggatagatcgatgctgcttctccaaaggacatacaccggtgaactgtctcattggcgtctttaacataatcagtcaggaattcagactcttcaagggctggccaattggcaatttggaccgcgtagaggttgagccaaagttggataaaccaccaaggacctccacatcctatcgacttgccatttagcaaattggttgctatttggtacaaaagttggtatatggcccctagtagatatttccctaaaggcatttctttaccattcactaaagcctcagcaatgtgttgcatgttgactgttgggtagtaagttgttccattaatgacaaaactttccagccaaaggttttaaaaggctacatgctatttcttagtaatagctccggcattggaatgtctagcaatgtatcctgaccaaccacctagacctttggtgtccaatatatacttgcattttgttctcaagttaacaaagttggtggaagagattgtatctaggccaatcaacatgttgatattcaagtaatgttggagtcatcggcccaagattgaagaggaagcatttagagtatctcaccaaaaatatgcaaccgatgacattaggggctcatctttcttcatttcagccaaggaaagtgttaggcactaagctattcctatatcgaagaagaaagaatattttgaagctgacattcttctatacgaatttctccacccagaaagctttgatgtccaagatctgaaactaagatgccaacgtgccaaaccgggttatggcctgtctgaaggaaatcggcctatttgtttcagcgtcgattaagtaagtaggatctatttctcccatctgccaaagaaaataatggtcagactcatccaggacagggattgctatctgattactcaaatgctacaaagatcaagaaaagaggaaatatgcgaatctaggtcgatgacaaaagtaaggaattagagaaaactaatgaacaatcaattggaggtcgtcgagaggtagacttatgggttaatgggtttacaaatccaaagaaataatctcaaagggctcaaaaacacattaccactggactaaggaaccaccgcagaggaggcctgccaaattctgggctggtagggccagcccagggttcggccaaacccccatctcagtcgttcaggttggggtttggcatggacgctccagatgatgtcctgatggcgattggagggtatttccgacaattcccatcagcccaactgtcattacctgcctataaatggacctcaccttctccactctttcacacacttaagcaataagctcttgatctctctctctctctctctctctctcaagtttagtttagtactctagtgctagtggagtagaatagaataattttcttagtcctcgagtcttctagagatttcgggtatagctctagcagcttttatctcttcttttgtaagacttatcgaattaatagaatattcttctttatatattttcggtactttacttcatccaagtacccacttattttatatgtcccactatagttgtgtgactagcttaccagagaatgatgtgggtttaatgttcatgcgaatgattgctctatgacattgcagaggatatagagtaatattgatacgccccgaccaagaccattcatacatagtgtgattgttgcgcatcaatgcaaggctaaagctatgcttaactccaaatcttattgtgttcatcacgaaaggctgctacttggcttgtacgattgtaggttaaagcatattgttgtacttaaagagagagacttgactcggattaccaacactacaccaaggcatcgtaatcgtgcactaccgttgctatcatatgaacgtaaaccatcaattggactagtgctaccatctcaaggaccgactacaccaagtcgtgtggttactccatcactaagagatcatgccaagcatggatggagtactcaacatcattcaataaaaacacgacaaaaggttaattcgtttcttgctgaatttaactttagtattgatgtgaattttatactatctaaatggtgtatatttgatttgctaatgttcataccaaaggagatggacactactacaaatatcaacgactacatcaataacaataaagattacacagaagatgaagtgacatttgctcaagtggagatggtttacgacaacgagcagaccggttatgtgcagatgctataacttctaagggatgtgcgactcagccagtcaaattcctccatgcataatatatatggttggaaagataatcaagtctagtttcacctccaacaaacggctagtcgtctcgacttcccatgagagagtaatatatatttttgtggaggctgcatagaagctgaaaggctctagcgaacctgctcgggaatgactcatggaaacccttgagctagccatatttatccccatctaggaggattgttcctattataaatatcccctatgttttatcatttgaaagacttttgacaataagaatatgaacccctttgtttagctgtgtgctagcaaattcagagatagatctctacgcctttgctcttgtgatttccatgttagattacagaagcggcgttcgacgccccccaattggtgcttctggtcccttcgacgtttttccttgattgattccaggttgtgttggttggtaacttagagtgtggttggacgaaccctcgattcaggttgtcgtaatagagatggtggttggcttcgagtacgatcgtcaggttgcactgttatctttgttgctcgcaactagttatcttgttttcgttgaggctagttatcaattcttgatcctatgccgtaaagatcgggacatcacccctaccggggtcgtatcaaatatttaataatgtaaacgtggtgcttatatcattaagtatcattatttgggtatatatgctgcgggacagtagaggtgggccgctgatggtgacagctcagtacggttattcctccacgttattcctaagacactttcccagggtgggtactcctccgtatttgatcccggttggatggctatgacgggttgtcgtaaggaactcgacaatcaggggtggtctctcgaaacaccaggagggcactgttaaggggtattggttgcatagctgtatactagcaagtgtaaactaaagatgtatatatattaagtataagattgaattattttatatttcttttcccacatagcctaggtttatttaaataagagaatctgagttcttcttacttcgtgtcactctatccagtacaaatgaattaacccctacttagactttgatgtatactggtaatatataaattattagcatagttctctcttataaatcttctattgggattaaatacatatgatacattggaatacttccgggtgaaatgctaaaatggtatatccgtgtgcttgcggattacatctgtaaccattaatataccaggattatttatgcatcattgctgggaatcatattaccagtagtgtcgttaagaaatacaaacaattcacaaactgattgtggttccccggttttgtacaccggaaaccccatatgtcttacaatatcactccctggatcagtaggtggtacacacatggcatagtcgaatatcacaagctgacatcgttttataggtattgtactacattaataatacaagggttactcaactaggaccccaaataaaccgagcatggtcatgcacattacaaaataccaaatggaatatagataaaatagctgaagcgaagcagcaaaggtccatcaaattccataggcattgactggtgaacctagatccctattcctttgtcttcgacacgttttcaacagcatagcatgcatatggtcgactccaactcctttctaaaagttttaaattaagtaagggtgagtacgaacgtactcagcaagccaccactacagaatgcatctagtgcacacaggggttcaaggatggctgggtttatttgcataaagctagttttcacaattcattccacaaacctatgacttagcagttttaactgaaaacaacattaagttgaagttgtcattaatcttcgagggttcatccgccttccccaagcctcactttgtccggtttaccctcacatccagattcttatcatcttcatcatatcgaccttcccgcactgtgggcaaggtcacacagttcgctccatctcaaatcttaagcaatattagaacttatgagtctagtcaagagtagtacaagtcaaggcgctcattagccgcaagcacggctatttgaatagattggtttactcacactgcagtggatgtacgcttttaatcccacactccgtgacttgcccaacacatgagacttgtcagggcccggcttttcagttattctcgcattgcggcacccgctccaaggactatgagccccatcgcacccccggcacaccaaacctacctcgagccggaagtgaggggagtcctggcgctcccgggatcagggtatacacacacacacacacacacacacacacttatagggtgcattttaggtttttaccggtattttccaatcatcaacacttcaacaacaacatcatactcatacataacctaccatgactggggtgccaccccacaagaatttcctagtccatcgggtctacctatttgtaaaatgcggtcgtactcgattcgtttcctatatagcttcctgacttggtccttaactgaccaaggtcgacgactaaccctttctagaaccacccatattctgacgccttcaccaacgccgatctatagcggttgctcacgtgtgagcgctatcgtccgcccctctcaaatttcgttgttaacagcccccctcctctccgcgccaccgccatgttgccgaagaggaaaactaggaggctgggaagccttcgagctggaggttggaacctcctttgcgccgttgcccagttgcatgagaggacaaagaggaaagaaagaataggtgacatgtgaactaatggtttttcgtttttattccttttcatttacttgtgggttccacatgccacgtcataggtagatgaagtcaacacaccacatggttgcagtcagctgaaacctctattgaaatcacattaggactatatttagactggtttagtaagatgagtgacgcattatatctggtattatggtataggatatgatctgaacttgatgtcaagatgaaggatctcaagtgagcttattccaaataaaaacctttgcctgaagtcctgtgaaattcgtcctgtccaaacagggtaaattcttggggacggaatagatatagctaaacggaataagttcatttgaggtcccttaacttgtcaacgaatctgattttcgtccttcaatctaaaaaccaaatacaacgggtccctcaattatcaaaaccggtgcatatgaggttcctcggtggtttagatgacggttttagttgacggtttagaaagggaggatattgagaatgatgtgtggggccaaggggccccaccatttattattagagaaaatccatgaaatgccattgacaaacaccctaatcccagaaataccatcgacaaagacaacttcccaaaaatgccattgcacaagcctctttctcctaaaaatgccatcaccgtcaactccacactgttacatccgttatttttttttataatgtccattctgccctcagtgcaaaatatactccctattttcactgtgaggaaaaatgctgagggaaaaagaaccctaacccaatcgatccggtgaggaggcacagcggttgctcggcgacgacggctaggtggtggtccacggtggtggagccgctatgccggcggtccacggggggccgcgcggcagggcaggcccagggcagcgttgcagagaggaggccaagggcggcggcacggcgagggggcctagggcgcggcgaggaggcccgcggtgccggcacggcagggagcggcgaggaggcccacggcgccggcgcggctgcgagcggcgaggaggcccacgatcgcggcgctgcagggcgcgtcgacgcggttcacgacggtgtggcggtcacagcctgcggcgcaggggccgtaggcgccggcgaggagggtaaatttgttttgcttcttttaatgaatttgaaatctgcaagagatgaactttgtgtgtggatagtaggttgattcagttgtccttgctgtttttgtgtgctttacttagaaattttaggtatccatgattcacaatcgagctgagggggtgatctatcttactgaactttcatgtgaaatagagatgatggagaagtatatgtttcaactgaacttgtctcggaggcgccagcgaggagggttattgatagctctatttttttctcatatcacaatcctgattattgataacaaaatttctgaaagaattgcaatggcaaaatgtgtgaaattagtttgtgaatttaattctgaaataatttgattgataacaaaataatgatgtctgtgaatttagttgtggacagaaatatgtatgaatgcaaaataatattgtgtgagcaaacaatacagaatgatgatgtgtgagcaaatggatgcctaggggtaagattgtctttttatacaacttaatggagaggacttaacagcacttatggtgtgatggcatttttgggagaaagaggcgtgtgcaatggtatttttgggaaattgtctttctcgatggcatttctgggattagggtgtttgtcaatggcatttcatggattttctcttattattattattgtgtgaaactgacatgtgggccctacgagttttttccggttctaattaccacataaacgccacgtcaacgccacgtgggacgatgacctagtcaaaggatccatgtagacatcacgtcagccaaaaccgaagatcaatgctgccgagggacattatttgcatggttttgtaagttgggttttgtaagttgagggatgttttgtatttggttttccggactgaggatgaaaatcggactgggggacaagttgagggacctagagtgaactttatcctagctaaaataggcttttgctcccccctacttacaacacgtccggcccaacccaatggtttcacggcccacaacgaagtgaccggccgccgcttcgtccgcccaggcgtcggccgcgtcgctgcgcctctctcctcacgcgcgcagacatcgacgccaccaccccgccaccgcgcacggcgggcggggaccggaacagcagccataagaggcaggtcgcgacaacccccaagcgccgtcgccgtcgagggcggccgacggctcccctgttcctttctgctccgttccaaagtggcgaaactaataaaacgaaaaaggtgagtcggtgtcaatccacctccgacaccacgccaccgcccgtccgtctttctttctcctgttccttgtccggggtggcgcaatgattcgcccggacacgccccgccctcggcgtccgttcccttaccgcgcaatgtagaaaccgtgcaggaatcaggtgccccttccggtttggagatggtgaaaaccgacgagaaccgggctgctttctcggtgtcgtatggtggccgtttgttgccttgctgccggtggggcgtgaggtgaggtctgtcaactactcactacgggggaaagggggagggtgaagtcgttggaaatttggtcggcagggtgaattcgtccccagtttaatctgttagattttgtttttaccgaacggtagaaagaaactgttatttctctttcttgcttattattagttattatcattactatcccaaaatgagccgactggttattctgatctaactaggtcgattgtttttaatgattgcatatggtgtggtctagaccattgatcggcattcttaccctgctggttagctttatcggtaagggcacccgcaatggttatctatatgctatctacaagagattcatgtcagcatattttcctacatggaagagattaaatgaagagagagagcaaagctatctactaacctggagatagtctatagagaaaaacgagacaatagattagagagctatagatacccatataaacatactattgaggcgatttactattaatctagtctattgttgagatgtacatgttttatagagagcaccttattttatcattatgggtgccctaagcaaatattgtgacagaaactggttggagttgttacgttgtattcatttggatcacatgtttcaagaccctagcgttgttactgtaacatttactacagtatggaagtgatcttacgtcttataggctggcatttttatgtatgaatcaacacactccagacttgtagcaggtggctgtagcatgaagtagtcttacataaatcccttctttagtaatatatctcttttacactgtattttttcacagaaaagggccaaaaccaaggaggggctcatacagttctccttttttttttttgaacgggcttatacagttttgacacaaacaggattccccaaaaaaatatttgtgttgataaatagaataatagataagattagagtagcattatgctgcactggtaaaaatacatctgagcaactgtagtgtgtgcattttattagctttaaagaactaaaactacagttcattcttgtatttgtacaagtcagaatcaattgttctgtggatttcttatccaacacgactttggctgctgggatgcgtgtgtattccagattacacagttatatgattctaaatagcacattgttttggtgaccttgcagcttagtagttgtaataatagagacttataactcttgcagtatgttgtgctcgccaggttgaaacacctgccaaacctgttatgggactttcaactccatggtctgagtgcagcagtgcgacacacacttcactttacaaatattatctgtatagtaatcttgatctatcttaaagttgtcctcgtgatcttacacaatgtttggctcattagtaggtgatttttcattttattctccataaaacctataattactattattttcagagtcttccataaaaggcactaccaatgcttgggagggatgtattttactagatcacgagacgtaattacagtcacaagatatatttactacttcaagtgaatgtgtctacagtggcagtggcaaagtactataactctttcattacaaaatgaggagaggtgtcttggattcaggaaatgtactttatgtttatatggtaatagagatcagctatgtacttttatctttcttcaaaattgaggttattagtccatcaattgacgagcaataaataaatttgcaagatggcaagtttggcaaccatttcttatggcttcaattttcaacatggaaggatcatgttggcaataatctcctggtctcctaacgacgcatcaattgaaattattaatttgaatggtaagtattggtttgcagttaaatttctgttgacatacatttttgtatgaaatggaccctccgtcccaaaaaaaaaaaacccaatcacaagttcgaatctagacatagtatttgttcagattcaaacttaggattaggttctttttggaacagagaaagtatggttcagtattacttagtctatcggcacacagcaattcaaaattgttgctgacatgccagttacaagtactgtgacttcaaatccacctgtgatttgaaactattgcaaatatgcatcctttgttcagaattttgtctaattatgtgactgcagtttgaagaatattgagaacaaaaactgctacaatgtttatttctttcattcagttgttttattttgccataactagtattttggaacagtaaagattctttttcccctttttttataaatgtgtactttcttcaatagaacagttctttctgttgtgaaaaaagaagaaattttgctactttcaacatttaaacctttaattgtttgttgtttctaaattgaacagaaacagttaagtattgttggaattcaagaggtgtttgaaacatgtcaatcataactgtgcaggactatttccatcaagagaggatgaagctatgccatataattgataccactatttggttactaaggcaggaaaccttcatcaagccctatattatacttccctttatccaagttaaaggttgtgttcctacttcctggttctactgaacttcactggagcctgaaatcatggcatacttatttctgtatctcaaagcaaatgttgcacatgaaattttgaagttgacatcactaaaatgctcaaactgggttccttctttcgtttttaccatcagatgaccagcgtaacttacaacagagactttctgtcactgtgtataagatatttagatttctggcttttctattagcatgggcaaaacaatatcctacatgatttacatgcctgatcttcctttttcccctttatattagcttgttttttctttctttcttgtggggagtatcaactaaggtagcttcttcatgtggatttatattttcctttttataatatttcatatgtgttgaaattataagcacataatgatttaatctattccacaaataaattatgacattgtagatgtaaactagcatgaacgcatcattagatctacacatgtaaactaagcagtaaaacatgaacagatcaaatatgtgcaacatgtcaaacacgtaccgaggtggtggaaaaaccggttgctcagcaggaactactcgcggttgcaggcgttgatgaaggcgcgcagcacgcgagcgaagtggaaggcgagccatcgcggacgaacagggagcagtcgcgcgaaacgcttcccaaaaaccttattgccgccttctcccggtgcaggacgtcgaaggcagaggttctggagacctactctccagatcgccggtgcacgccggcgagcgggatggaatagtctacgagcgacggcgcaacacagagtaggaggcaaaccctaaactgatttcgcgtatgttgcgtgaaggcggcggcttggtttatacagagataggtcgcttgatcagggcgcccgcaagatctccactccgcataaccgaaccagataagtcgcgcgtaacttatccggactccacgccgttttcacgaaccggattttttggaatgtttccaaaacaaaacaaatccgaatttcccgtagcaaaataaaactgcaaaaggagacttgcatttgcagaccattcgacgcgtaacatcgtgcatgcgcgccgcctgccaggcgaggcgaggcgaggcgagcgcgtgtgttccccctcttctctccaccatacacgcttcaagtggctaggagggcatccttgtttttaaggaggtccccctctcctagaataagcaagatggtactaaactccacatgcatgctatcttatgaggtgggcttttgtgatttttctaagaattaatcttagaatgtgccttatcccatctattaattccaacaatatgcaacggcaaagccagctcccagctgatcaggcggctgctcaagctccgccactggcatcaatactgccaattggcagaaactcctataaaagttgtcagcagctaagaaatgctctacatcgaccgggcttaagagtgctgccggccctgcgactgttcatatggtataacctatgcctttggttttctgattagtggattctgcatgtgtaggtacccacagtagatggaaagtcactgataaatgcatgcctatgggtgatccagccaagaggtatcaacaaaataaaaaaaacattaattattcagatcagcacgaatctgatttcaaatcaattcaagaaggaatgtagtaatgtcttggttttttctttctgcataacaagtttgaagttcaatattttaaatttgacataacatcactactgagaaccggtgcctaaaacctggaagtctggaacaatataggtgagctgggtgaataagatttgattttttttccttgcttacatttgataaaaagaaattgaagtaagtagatctgatatactatgaagtttattggaatatggagtgtgcagatgtaagtcacatcacactgatcttattgtgtgtaatgagtaatgagacaagatatctaaacatggtttccactgttggacttcaagcttggatctctctttgtgcaaaattaaatggcataccaaatgtgtgatctgaagtttggttaatacagtacattttgggattggttgggtcgaatcaacccaaccacaattgtccagcatgagccatgttaaacacctgggtccagctaggccagatattcacaaaaaagaaatacttcctccgttcacaatgtaagtcattctagcatttcccatattcatattgatgatatgtctagaatcattagcatcaatataaatgtaggaaatgttagaatgactttaattgtaaaacggagggagtagtaaactcttgggcatttcttaagtctgccaatagtggctgtggaaaagtaaagctgtaaaactgaaccgcatcggaaaccagtcctctgacaacccaatcgctcacatccccacaaaaaagtggagaaaatagagctgcataatcttttcctgttggaatttagttcattaaaattgtatctagctagaaatcgcatttccatgttgattttatggattgtgccaagcatgtccaaccaaacaatatttgtttgattcctggctacccagttcggttattttgcatgtttaccatgctaaacattagtaaactaaagtaagaactagtttatccaagtgtttcttttttcagcacttatagcaaagtaaggacatgtacactataagccacggtagaagtagcctcatgtagaccataccgtctaaggacacacataggaaactctacccccaatagaggatactctcaaatggatcctacaaaatcttagagtactatatgaagatactgcagtccacaacacgtgtcccagcccacaaagttactaatgttgttttccccttctaccccccttctttattttatttgtctcctcccctttttttttctcgtctcctccgcttcagtgcctcctcctcttctcttcaccacgctcaccaccggtcatcagcgccgccgactccgctgcaatgcgtcgcaggctccgccccaccacgccaccgatgactccgccccatcgcaccgccgactccgccccaccacccgtcgcctccgtttttcttcaccgcgctagatccagtagtggctggcgtcgtcgcaccaccgattccaccccacggcgcgcgaggcgagacgcaacgtgagctcccgccgctctctccgccgatggctggggcgagaccgcgtgcgggacgagacacaggggagctggtgcccgacggatggcgcccgttcctctccctctgccatccctaagtcatcgccaacgcagatccatctttatcgcgccgccgtgggctcctccaccacctcgccgccaccggttcctccccaccgctgtgggtctcctgcctcctcccagcgacgaggctgagggtggaaatgggaatttctgatgggagccgtgttcatgaaccacaacgtcaccaacgccgatcctaactccgtggctcgacgaaatggaccaaggagcggagggaggcgcgtgcctcgcagagttgtcacgcccctctgccgggagatggctccgacccaaaaagagacgtccggtcagcggtgtgagtaggggcatgggccaggagtacccattgtacatgggctaataaaaatgcagcagtcgaattccatgacatcgtcacttttagatttgttgtccccatggccttatttcgtaatgccttatttaaatctttttactcttgcgttgagttctttttagagcactttggaagctatgaatgtgtgtaactagtacgataaggtccttgacacacttttctttgttgatgttattgtttgaatagctgtcttgagaaaaagctgtgcggttgttgattcagattcatgtccatgtcgtaatagagcttttgtagtatttgaaatttagtcggcgaggcgtgagtgacagctgtttaaccagttggttttttacgttaacaggcgcactattgcatactgcagagcatgtgttagtgctacaagctggagggccccctcaagcttacacttgcgtccttgcccagctcaacccgttactttttggctcatccaatctcttgtccatacgcaggtacgttctgcaatacttatcctcataaagtctggtctttttttcttttatttggtttcaagtaatccacatgtgaacctcaatttgatgcctaaaacgagggttttccattggtccaacgggtttcccttttcttgtgatgaaagatacatacctaccattggtaggcgacgattgtgatgttagcatggtactggaccgtatgatctgtgtagcaatcggtgaaaggtttcatgggaaatatctgtataattttcctgaaggaattaatctgcatttttgtcacggcaagatattaccacacctaaccgtgactgttgaaacaacagcgcgaataagcatccgtaaagtagacaaatagtatgttgagccaagaaatcatttaccaccaccacctccctttgctctcgttaaaagagcatcgaacatgtagtatacactgcgctttcctgttttgctgaacagatatatacaacgttacgcaggcacgatgattcctccttcaaacacatttagcaccgaacagtcttgcctgtgtctgctgctatttcactaatcgtctcctgatgctgaaattcctgtccagatcggtgctctccccggtcttcttgtaaaacccctcgcgtcgatcgtcatatatattcggttttacagctagctgttgcagatgaggaaccgaacaaatgcagctcctgtagcacattccgattgttcgggcgtcgcgtggcagccagaatccatccacatcattgtgccttcatcatccactcatcaactctcatcagtcggaggcacacggcgctttgatttggcaagaacggctgaaaaaatgtgatgatatatctaccagttctctcgtttgtatacaatttcaaacgcaaaattgttgtgtgacgagccgtaccagggatggcacggcatcttttctgtgtgggtatgtatgtgccagtagaaacaggggctttggccggctaaagttttgccacctgatgaggcccctgttccggagccatttcggcactgtgggtcgagaaagaaagcgagcgtgggactcccgtcaaggaaaagctacgtacctgaaaaagtcccacggcaacggaccatgctaatcgtgaaactgccggccaccacccttatcattgcccacaggttgatgttgacgttgccctcctcttcttcacctcgatcggctactattgccccagctccctgaatcttgatccctctgatggagaacttcatcttcacacaaggaaaaaaataataaagaaactaggaactcgaattctccttgttgcatcaaccaccttgaccgttgcaattgtggtactctaaatctctaatcaaatctcagtcgcttgggcctgtcctgatcctatatgcaaccgtttgagagtgactgctgaacgacaatgtttcaagcggctctcgtgtcactaaatgtcatgtgttcggaaacaacaaacctaatttaccagtagcaactgattgcaaggatatttgtgcatgggtgcactaatgtagaattgatttttctggagacccccttttaattgcagataggctatagctgttcatgcatgcaaaaaattgttttcctaggaattagttgaaggcatttttcatatggccgcttaatagacccgtttacgaaaataaacttaatttcccgctgggacttttaagaggtttgtctataagtctgatctccctcctcttaactcagcaccttcaatttttttaaaagtttccatccttatctcctcacttctctcttcaatctctcccttcctctcctacattctgctcgagctagcaggcttggctagtggcagtgtggagattatggataccccatacctacacggcatgtatagtccgactgggtatggggtgccatgtatagatagaatatctttaaagggactcgggttaaattctaaacttgtatgtcaaggaaatacccgagatcctagtcggttacgattgtattttatctgtaactacctattccgttagggatatggactgtattttgtaatacggaccccttcccctatataaggaggggtccgggtgcctctaggggcacaatttttcacccagatcatacgatcaataatacactcgtcggatcaatccccggataggattagggtattacttcttgattaagaaggcctgaacctgtataaaattccttgtctctaaacccatccacttttctagcttgatagccacccccttttagtattgccgaaatcttgtttcgacaggcagtgatggcgggctcaggaataaaagttcgatctcgagcttttttagtcggcgacctggttttgagaaaaattcaaactacacgagatcggcacaaattgtctcccttgtgggaaggaacgtttataatttctgaagtcactcggccaggttcttaccaactcaagcgtgaagacggtactcatattgacaactcttggaatattgaacatcttcgtcgtttttatgcttaggcattacttttgtattttcctctttgactgttaacatcaagttgtcccttgagttatcagtcgggggctactataataataatagagtgtgatttttatcaattcaatttgcttacttgatttatcattgccttgtttgattttttggcttagccaatgaggactgagtttttttaaaacttttgaggtttctaggctcaataaggtttgataaaaacttttaagaaatctggagctaagtttaaatcatcaagcatagcataaatttatcagtattgtacaaattgtgcctccatcatcatcatcatccttatcatcagaatacacaatcaattagattcagttctttcatcatcagaattatcagacccagtcggcttaagatcgttgtcctggaatctctcaaccacatcagcggctatcttgtcagcggccttttgcgcatcactaataaggtcaagggcagcctcttcacttgtcccgtctgcaaagccgtcaacagcatcaatatcaattttcgggtacaaggacttggtcatcaccagcgctaggcctgctcccatactcccagtttctttgatgttcttaaaatatgtatctggagcagctctcagcttgtcgaagatttcgacagcatcaagtgaactcggaccgttgttattgaaaaacatcacctagacgagtggcgtagcggcattggcgacttcatctctggctccttcaagcttcttgattttattaactaagacatcgaattgggcctgggatttgatcttgtggtctacatgaataagtttacatcaatgactaggcatgaagattagagtggtttttgaagtattagctaccagtaccttcgacatctttcagagccgagtccctctgtttcgccaattcggccttgtctttctccagagcttggattcgcttctctagctcggatatcttggaagctttcactgtattgcctttcattggtcagttgcacatggatagcaacatgaagcaggtcagacagagacgatatttaccttttgatgaaccgctcagctcaaagttggagtcttgaagctcggcgatccgatctctaaggtcatgttcagtcttcctagcaagctctttggcttcacgcagctggtctctggttgcttcaagggttccaaggtggggaactaatttttcaagagttgcagtcttcgcctcattcctgagatggattctctgcaccacaaatttatccgtatttaagcatggtggccgacaggatgattgaagccatatatagggagacttacatttacaaggtgagtagcttggccgagtgtcttttttagcagacatacttcctcgtcctctttttgtttatttattacgatcccctgcggctgcatttcgtcatcccaccacttgactaatatgggtgggcgagaatcttcagccgattgtatccggaggacctcttcttcgtcaccgatcattgcaccttatgcattcataaataatggtgggactattgaagaaagtttgtcagatcaaagcagatttcagagagttgtgtacctgttataacttccggtcggggacgagcaggcccttgtaccctaacaggagagctggaccctggattgacgttggcatcctttttaggagggctgtttgcttgagcctctacttccgggatgtcattattttgttctgtacccgactggtttccagtcgagggctcctgattagcaccgactccagcttcgtccgactgatttccagtcggggtctcgttgctggtttctacattgtcggttgctggatgattgtcactcgggcgattttcgacagtcggcccggtttcttttcaaggacccatctccatatcagtcggctcagggtcttttccataaggatctatgtcagatggcttcctacaaatttgagttatgctatcagtgctatttcaatagtgagtgagcagcaatacaaggaaaatggccaaatgatttgtacctggaggacttactgattttcggcatgggacgactggatgatttcttcttcggattagcttgccttgattgttttccagtcacccctttgctgccagccttttcagcatcgtcattttcatcgtcactcagaaccaaattcctcttgcggaagtctgactagttagccgattgagaggtgttgggttgagtgtcaccctggatttttggtcctccgccagcttgaccagtttaccaccggggtgagcagcattgagcaattgggggatctgacttcatcaaggcgaattcctgggcatgatgatccaagttttcaatcaactttatagatgataaaagcgtgcttttgagaaaggctgagatattaaatacataccggtggaggggggttgaaagcattgtacggcaccactggcagcaagtgcgagtagctgactacgattgcatttgagaagattttatacattctctcgttcataactttgaattcaagagatttaggatcttcacggttagggtcatgcttgccatcgaattcaaaggccgcgcgagatctttcattgattggggccagccggctcttgatgaaatgccgggtgatctgttctccttgcagaccctgctccttcagcttcagcatacgatccatcagggaaagcgcttgagcagcttcatctccattggaagtgagttccaagtatcttgatacactagaggaaggcaggagtactcgggaagagctggttcgggattttgtacataaaaccaatttgcatgccaacccttattcgaagttttgaaaggcatggagaagtatttttggcttaaggttcccctcagttgaaatccagctcccccaactacatggtttgctcttgtttggctgggatttgaggaagaagatgcgacggaacagggcaaaatgcggtcttatacccctctcaagttgttgagtttgaaaatgtaaaaattatatgaatatatttgtcttgaaaaataatttcataaaaatatacatatatcacaaaccccagccaaacaagaggaaaccatgcgtagttgggggagctggatttcaactgaggggaagaagatgcgatggaacagcgcaaaatgcggtcttatacctaggaaagactcgcaagcataaataaaattggcaatgtggactatggagttggggtttaggtgatgcaaactgatcccgtaaaactccaaaattccccggaaaaatcttgaggttggaagagaaaatccgccatagaagaaatgagaaaataccacgacttcatgtgtgtcaggggttggaaatgcttcgccgcacgccgcacgccacccgatgatttccttcgccgcaagaacaccatgcgctaccatttccttcaagctctcctacgtgacgtcggaggacgcccattggctctcgaagctctctctcctccaccatggatgtgaattggatgatgcgatttgctttggaaatggctgggaatggatgggggatcgatgcggtggatgcgcggaagatttctgtggagttttggaaggcggatttgagcgaatcggtgaaccctagttccgctggtgtggttttgcactgtagcggggaatggggaaagtggcgagagtctcggtggggaagatgaagcggcgtttggtttttggtattattagggtatcgggagtactaatgggcctaggcccggaacagtacttcagcccacttctttctatcagcgtggctaagttgtgatccttagggacttaggcgttttgcttcggcaatacttgctcgcaacagtgtagcccaatgctgctaaaatcctttttaacgctgttagataattccttggaattatcacgatgcaaatgaaaaggtgtccgacagaaaggtgttatacttcttttgtaagcctttttaggttgcaaaggctgtttaggttttgttgagatgattggtttttgaacagtcattctctcggcatgttatatgcttattttgattatgacgtgagtcatagcctaggctatttcgactcattaattgtcatgatatcatatttataccacatttgatggatctttgagagtttttactcagattcttgtcatatgtgctgatttatggaccttgagagtattttttactcgggcctctttatatcttcgtttttggtatattaaagctaaagcagtcggctggatgttttattaaacgttgcatatgcttatctgtatgatactttggataattcggttgtaaaaccactcggatggatgttatttgcactttgactatatgtttagcctttagctactcacatagtcgggggctacacctaatgaggtgcatctatttgatgcacccgattatttatttttagcccttcacagtctttgattttggtactcgggagatcaatgcagaagaaattgaaacactcggattatcattttgcactacgagagaaggctattttatcgactgtaaaggtctcaggggctactgtgaagattatgtataccccatacctacacggcatgtatagttcgactgggtatggggtgccatgtatagatagaatatctttaaagggactcgggttaaattctaaacttgtatgtcaagcaaatacccgagatcctagtcggttacgattgtattttatctgtaactacctattccgttagagatatggactgtattttgtaatacggaccccttcccctatataaggaggggtccgggtacctctaggggcacaatttttcacccagatcatacgatcaataatacactcggcggatcaatccctggacaggatcagggtattacttcttgattaagaaggcctgaacctgtataaaattccttttctctaaacccatccacttttctagcttgatagccacccccttttagtattgccgaaatcttgtttcgacaggcagtgatggtgggctcaggagacgacgggaggggcctccaaacgcacagatcccaccacctctctccctcatcatcttcgatcccgatggccggaggtcgcggagtggcggatccgtcagtcgcagattcggtctaggcggatccagcggcgatgggcttagatgacggtgggagtgatggttggagcgggatcggcggcggcaggttcggcctgcacacgcggatcctatgtgtgtctagactccataggatttgaatctttttggaacagaggtagtagttctgtgagaaatttagtgttaaacatatagttttgtgatacgtcatcttaaatatgtacaactccgtcccaaaaaagataaaccctagcacatatgtccaggctcgtggctaggattgagtttttctatggaggggtagttttgtaataatttaaatatatgtagttttatatagtttactcaaatgtaatttaccgacggcaacggccgcacggatattgatgcaaggatgacgtggctcactaccgatttattacgggcaccgaggtgccaatgcggagctgctgtgctgaggcgcgcagcacacagaaacaggggcaagctagcttacctagctagtgccctgaaaaggtcacctcatcagggtcaagtgatagtagtgatttctgacaacgagcatagctaggggcctttcttttttttctatttgtgacactggcttaggaagtgaaaaaaaagggacgaaagccccgcaggtattgaagcgagcatttacaaaaatgtttcccccggaccttttaaatcaaaagatttcatagagaaattttataggatacaaatcatatgcaaactttttccatttgaacctttgatacaaaggattggaggatttcaaatcttatgaaatttctgtaagttgactcattgtatgtaaatttcagactaaacttaggctgtgttaattcctagtggttgggaacactaccctccattagcatatgattaattaagtattagcttttttttcaaaaatggatcaatatagtttttttaaataactttagtatagaaacttttacaaaaacacagcatttaacagtttgaaaaacgtgcgcgcagaaaatgagggagagaggttggaaaccttgaccttcgaacgcagctttagtaagagtttcaacctcttgaattttttttctctcttttatctgactcttgtgtttttctctgactcaattaaataattatttatgtctttttttatattttataatattttgttttacatttcatttctgttcatttctgttagaattctctgttttttttaattttttttcattgctacaataaaaaagccctaagaatgaatgagattacacacgatcgaccgagcagggaaacgaaaaagcggatgaagaaaaatgtaaaacaagtaggagtagccagcagctgagtgagagcaaaaatggagaaatgcgcgcgcgcattgcgttgtgtgttgccatttgccaatcccatcgaacgcgatcgatgttcgtggcacgaacgagcgtacgatggcgtcttcttcgtcgggcgtcctggaaatgcggcacagggaaggtggaagggaggggagcgacagcggaatcatgacggggccacggtctttttgaccgatcgccgagaaagcaattatgggtgtttgattctgacactacaaaatttcgccattgatatacaaatcaatctgccagtcctttctgttgcttactctgcgtatgtgcgtgccctgcgctactctgcatgcatgctatacttacccatttctttctttctctctctctctcctactactctttctttctctctctctcttcccacgtccttgcggaggaaagagggggagggacttatcgatgccttttttttttttaacctctgccatgcatgagggacgaccgagttgatcgccatggacgctttattttttcgctccctcgtcagtgtcatcatatgctcaattcatcaaaggagacgagtagtgtaccctgagacactcagagagaggcctttggtgaaggattcgagcataatgatgcatggcaatagccacacggtggtcccttcattttctctctcttgcactcaatcgattgcctttctttcccatgcaaacagagtaaacgaaagggaaatatagctagaaagaagctaacgtgtttatgtatgttgtgtgggttcgctacgtactgttgcatgtatgtatatagttgcatgcatatgcattctcattaaggcctctcacagtgcaaactatggagcccgtaccctcagtccaaaaaattggtcctaagacacccatcccatagtgcaagcacccatatatgtgtgacttaatcggatagaggtactggtaaagggtcccaagcctacagtgggcatgaccctagtttctggaccagtagagcgaacgaaaatttatttcctccacttaccccttctagcccttcctctctcgcgcgagacttctcctctcctcgagtactactcctcttttcctctccgcgcctcttctcctctcacgccgggaggcgacggcgccagcagttgccgcctcgtcatcgtggtggcggcgccgccgcctcgcctccttcccctccctctctatccctcgccacgcctccttctcctccctcaccgcgacgccgatgggaagtcgcggcgaggaggcgtccctggcggcggcggctagcgcggtggcggaggctcgaccaggggacgcctccaccgcggcgacctcgccgagggagacctcgagcagccgccaccgccgcgaggaggagcgggtgggctgggccagcggcggatctagcggacgcggcgctcgtcagcgcgaggaggagcggcgagcgattcgaggtggcggcgaggaggagaaggaggaggaggaggagtccccgggaaggcgccggcgcaacggttcccctccccaagaagaggcacagcggaggcggtgtggtagaagaggcggcgcggcctcctcctcgcctcccacgccgcggcggcgtggcctcctccccgtcgaccgcgccgctgatcctgaccccaccagcgccgccgcggtcagctctgtcatcgatcgacgcggcgacggacggatccgcctttcccgacggcggggacggcaagggcggcgggaacagacggcagcgaggacgaagtgggtgcgggaatagtggactcttctgtgattcctctttgtgttcttatgtgattcctctcttctttgtgttcttgggtgattcatcttgtgttcttgtgtgattggcaacgaaatctgtggcgggaggaggggatttgggcgcgacttcttgctgaattttcgagggcgaataggggatttcgctaggggaatctcgcgcaagagcaccgggcggcgagggaacgactcccacagcgcacgcgcctcacatcgattcctccgcgcgtccccttttccaggcgaggttttgcgccccctagtttaggcacgagcgccctagctgagacgcgggtctgagtgacacggcagcaaaaatccaacgtggcgcgactaagacacagtccaggtcgacgcactgtgagaggcctaattgatttgcattgttgtggattgagagatggagaccgttccttgaggagcggggagacagggctcctctctgtacaagtacactgtagttcaaaaactgcaccatcgtctcgttttctctttaatgaacaatatacaactacagaatcagagctctcgctgcctgccctcttacagtacacgtcgtggctgtcaggggatgcactttaagatcgagaagagttgaagtctctcgtttcgccaggaggtgaaaggttggagaaagagaatcctatcgaccgaccgatgccgatcgatcagagttagcgtagtggtggctactacactgatggcttagctagtcgtatatatgcaatgcaaagcatccatgatccagccaacgcatacatgcatgagagagagacgatccaagtgaagaagaaagtagaggtgaaaagtggaggcaacttttctctgcgaggcgggcagcttttggctgctgatctggggcgagggaggcaggcatggtctccccctgctacaacgactgatcgcttgcacgtactgccgacctgcctatcttagaccctatttagtttcatacaaaaacttttcagatatatatgatatcatatcgaatatttggacatatacataaagtattaaatatataaaaaaactaattacaaagattgcatgtgaattacgagacaaattttttaagtctaattgcttcatgatttaacaatatggtgttacagtaaacatttgctaatgatggattaattagatttaataaattcatctcgcagtttacatgtgaaatatgtaatttgttttttcttattagtctatgtttaatattttcaatatttgtccgtatatctaatgcgacacgtcaaaaactattcagcattgaaactaaacagggccttggtatctgtccatcgtccgtggccgcgaaagcgagcgccgctgatccatccaagtacgtggtgcaccccagtggcgtcgcgcttgcattgcactgctttgctttgcttcaagtggactggccggtctcatcgcgcgcggcgaccccatctcgcttagcatgcatgcacgcccaaacaaacgcctacttttgcacgctttcccgctgctcccgtttcgattggcgacgcccccctgccctgaccccggaccccggtcggacccttgcatgcatgcacgatgcctatgcattcattcacgtacggtacggccgcacacgctgttgacctgacgatatgatcaagcaatatatatgtcgatcgaataatttagcatttgcatgctagtagtagccatgccagccgtagcgagccgtatgtttgcagggataatatcgtatcatatcggagttggcctcttgccaggcccaaacagtaccgtggaagggaaaagagcttttttttttgacaaattagtccttttaaaaaacttattttcaaactaaccctcgcaaaaagctttaactagaaataggcatgggctcagcgccgatgtcattagcgctgaggtccaaagggtcagcgccacatacgttggcgctgaacccgtggccacgtggaaccaaaaccgatctgcataccgacgtggcacgagttaaaaagctcacaagtctaaactagcattaatgatattgtagtgtggtggtgtggcctctttggttgcaagctagaggtagcaagttcaactccttcaattagcagaagttatcaatttttttgcaacttttttaccgtccttttctttaggacccctttttttccccaagtttactgtcatcaatttttttgcaacttttttaccgttattttcttctggaccttttgtttcccaagtttactgtccagctagcaaatcttcttgagcacttcccccagcggtacaaaccactttaaaaaagcaaatcgaattcttaaatttgatcccggtgttttttccccaagtggttacaaaaatattttgaaataatactgtaaaaaaagagaaaatattgtgagaaaaaagaacggaagtatactatatattccgaatgtaccgttggagtatatatgtcggaaatagtaacgtgggaaaaaataatggaaagtattacatttatttttgaagtatgcttattgatgagaaaacatgcaaaggctcccatcggatggcttaatcgccaaagaaaaagccaaaatttaaattttcaaacattttcatcatagtttcttttacaacgttggcttttaagtcaccaataacacatttataaaaagtttcatctacaaattcatttttatttcctaataagccgttttggcttattaggaaataagccaaacgatggggaccaaaatataagaatacttcaaaaataaatataatacttcaattatttttttcccacattactatttccgacatatatactccaacggtacattcgaaatatgtagtatacttccgttcttttttctcacagtattatctccttatttttcttacagtattatttccaaatgtttttttaaccacttggggaaaaaacaccaggatcaatttaagaatttgattagctttttaaactgatttgtaccgctggggaagtaccggaagaaaagaacaaagaatatttgctagcagataaaaggacagtaaacttgggagctagcaggacagtaaatttggggaaaacaataaaggtgcggaaatacagcttgaaggagtagaacttggtaccttcagcttgcaagcacaaaagccacaccacctcgctacaataaatttaatgcttgcttagacctgtgagctttttaactgggtatgagttcagctagttagcgctgacctcatgccacgtcagcatgcagatcggtttcggatccacgtggccacgggttcagcgccaacgtatgtagcgctgacactttggacctcagcgccaatgacactggcgctgagcccacggcctatttttggttgaagttttttacgagggttagtttcaaaataagtttttcaaaaggactaatttgtcaaaaatagttaggtatacgtacgtagtaacttgctatgataatccgtgcatgtattactcgtctatccgtccccgtgtcgtccatcatgatacatgcatatgccagagtcgtactctcttgcccgtgtcgtcgtcgatcagtcgccatgtacactacttcatccatcccaaattacttgcacaggtagagaaatgatatttgctggatcgaccaaaaccacgatagtcccggttttaaagattatttttagtcccggttagaaaccccacagccattctatgatatttagtttcgattgatgccgggactaaagatcattccctgtcaaatgcatgtcagggggcctaggatctttaagatcaccactttagtgccggttggtaatactaatcgagactaaagatatgactaaagatcatatctttaatctcggaactaaaattcaacgtgtagtatataatccctatcacttatcctctcctccacaatcgcaaatcacacagatcgaatctctccccctcctccttccccttcctcctcccctcttctacagatcttctacagatcagatcgatcctctcttcctcatcccctcccctctcctccacctcctcctctctcctccccctcctccccttcccatccggcagccggcggggccacgcccggcggcgggccggcggcagcggcgttgttttctgtctttttttttttgataatttgtgattcacagagatgtataattttctgattcattgtatcatatggatatgagatgtataatatgtgatgtatttgatttgtgtgtaattttttaggatttgtgatgtatttgatttgtgtgtataagtaacttttaagatttttgatgtggatttgggatgttactttgatttggggatttggggatttggggtttgatttggggatatgcatgccatttgattcgggagaaaaaaaaaggaaaatgggaccatttgggactgccgctattctctacttacttccggttagtaacatcaaccgggactaaagatccctctctttagtcccggttgctgttaccaatcgggactggatctttagtcatgcccatctttagttccgaatttatactcccggttgaaatcctgggactaaaggggttatcagccgggagtaaaaatggtttctccaccagtgttgtcttcccaccattcaaaatttatcccacaatacttgtcactcccaaatactatatgtcctatcaattacataccattcaaatttcttcctattctacccctccgttgatgtgaaaaacacacactggcctggaagatatgcttaacttcagtacaggtccaaaaatcttgcctttaggttcgtgagcgtgccagttgatttgatcctgcaatcaacaagaaataaagataggaaaatagcggttaaatccataaacgataaccgatcggccagtcgccgacgacgtatcatttatcttggagccgatgtcatatttaaatcgatcggcaatcactaataggcaagaaagaactaaatctattcgatcggctatagatattaatggtatataatactgccgtcgatatatacttaaatcaagtgattatgatagatcggtcgccatgccgagatagtataaatcacttatatcgaaatatatattaacaaggagattataagcattcacagcgtagccgatcaaatagatctagcatgtatcggctgatactccgataccactatattaagatattaaagcaggcaaaatatatcaaacatggagcttaatatacctaaatgcaacaagatcttaacataaaggacagatttaacatatcaatcaagcgtataagatataaagtaattaaatcaggtaagatcgctgaaagtccgatgaaaccctaatcagcaacaaaaagcaggctagagattgagattctaatcacgacttataaggtcaaacccaactgatgcagctataagtatgaaaagaaggacaacatctagacaatcaagccgttgaatgtttcatagggtggtggatatcctatataatctaggtcaatgttggtatttaacctaatcggctgccttccaattatagatattagccgattaaaagttaaataacaatattgccagagattatataggatatatgataactcaacgaattacataaacaagattagagtgtcataaagatggaagcactaatcccgagaacgcaagccgccataacaagctttacctctagttgaagatcaaaaccgatgcagctcaacccgaaagtaagaactcatcaaaagtaaacgaaagtaaaagggtggcgatgcgccgagattgtattgaacgtgtgttaattgattacataggttcggatcatatttatacccgagatacaagatatgtccttgtcggacacgacacttatctctaacaaactctaagatatcataagtctttgcggcagacttttgcccaaacatatctctaaggaaattacatgaaatatcctaattaatagatacaattgcctaaaccaagagctttatctctatcgtggcaattcctgtgaagcactttgaacgattcaaagagccttaaaaccgtcttcattggaatcagctgcatcacctctatcagccgtatcggctattctctgaccgatccatctaagccgatgcagacttcagccgatgccttcgcatccgatgcataccctgttcttcgaatcgatctctttattgaatccgcctcgatcccaatgtcgaacctagttcacatcttaccaaatttgatcgtcaacaccctcaaccaaccttctatccttaaccgtaaattattttataagggtattatagttttttgttctaaaccttagaatatgctaaacaatcttgaaagacaagtaatttgggacggaggaagtagctatataagtactcggtctgtaaaaaagaaaaaacaaatcccagtgaatccagacactgtccaaattgaactctaaaatttattcattttaacagggacaatactataaatattcgcaagagacgagtcaaaggtcatacaatcaagcagtgatcaaccgataatatagttcatctgtaatacaatataaatgattttacatatttaattagacatttaaattttttttatatttttagatggaggtatacaatactccactatatatctactccgtagtatacgatagcatactgtacctatagccagctagctagcgtacgtgcatgctgtacgtaaatcgtaatcccttttgcttttgcttggcctagctagctagctagcgtgtcgtacgtgtagagttggcgtgggcgcgtggctagttagctcgctctcgctgagcatggaggaaacgggacggtgtcagtactgtgtacaccaggagacagcgcacgcacgcacgcacgtaacgtgtgagctgtccaatactcatgtcttgctactccctctgttttgctataaataattactatatatgcatatagtaagttacaaacaacggtaggagtataaaattagctcctgggttgatgcggctgaccattctcttcctctaacgtatctacaactattgtgttgatgggatggtcatcactggtcagaaaacactataatagattggcgttcgcgatgttactgtttatagatagttaaggtccgtacgttcgtttggagaagataagaaaaggaaacccatcatttttcatgcgcacatttttcaaacgactaaacaaaacaatgctgtgtaattttaaaaacaattatataaagttacttaaaaaatcataatctaatttttaaatttaaaaataattaatacttaattaatcgtatgttagttgttcattttgttttacgtatattctcgaatcctcttctctcaaacactttagaattgtttatatatattgggatacgtcaattgaaatatggatcacgcagaaccgtactacacgtatatcttgtcgtccatgcgaccgactggccagagaaaattaagatcataattgacgtcctaagtacatggaaggtgatacatccatgctgtatgtatcacgtttaatttgctacctgctgtctcggatcgagaacatctcggtcggtcaacccggccggtggccattggatctcaatccaaacgtcagttagaaatactccctccatatttactaatctagaaccatatgtgatacaaatttaatttgtagaatttttttgaacattatttgtagaattaagatgggttctattcaatactagattgtaatatttttggacagaagagtatatagtactacctttttattatatataaagatagctgttgatttttccataacattttacaatttgatttattaaaaatttagtgtaaatatgtgaattatacaagttaaagataaagtttctttgataataaaataagtaacaatacaacaaatgatatttaatataatttttttaataagatgaatagtcaaatgtcatgctaaaaattagtggtttcatatattaaaaagaagaaagtactatctaggtataatacttatctaatattttcctttgggtatccaagccgtacatacgtaggtagtggttaacacgtctatagcttgtattcattctgtcctaaaatatagaaacttttggttagatgggacatatcctagtactacgtagtactacgaatctaaacagggtaagatatatcacatccaacaaaaaaattggtatattttaagacgaagggagtataaattaaacgtgtatatatatactgtatgtacattgtattgggaataagtagcatgtggtcgtgtccgtgaggtatgtgttgtccgctggtgagaattccggccctgcatgacgtgatgcgagatgggggtacgtagctagcagctagctagctttaatttgtgttagactcaacagtaagtccacatacgggtgcgcttatgaatatatgggtgggtcagtccggccagctcgcgcgtcatcgtttcgagtagtagtatatggggtgtgttttccttgaaaaatgttagaagtttagaaaaagttggaagtttgaaaaaaaatttaaagtttatgtgtgtagaaaaattttagatgtgatgtgatgtgatgaaaagttaaaagtttaaggtagttgggggtgaactaaacacgaagtcacgaagtatgcttgatgtgccattggattgtcctgtacttggctagtgtgcataaatcagtactactactccctccgtcccataatataagggattttgagtttttgcttgtaacgtttgaccactcgtcttattcaaattcttttaaaattattatttattttatttgtgacttactttatcatctacagtactttaagcataactttttgttttttatatttgcaaaaaaaatttgaatgagacgagtggtcaaatattgtaagaaaaactccaaatcctatattgtgggacggagggagtagcttagtaggatatttctgtctagctagctgctactaatagctactagtaggagattagagaggagacatggtacagtccgctcaaagtatttgtctagctagatataacatgtatcaaattctttttcttttgtggaattgcaagatagcattcggcaattttttcttcaaaaaactttctcaattttgataattggatggtctcaagatttgtggactagtcggaaaacctctatacgtatctcgatcgtgcatagggactcaaagtcgaaccatataacctgttggcaaatgctcacggcactaggtatcaggccgcacactcaatttgtttggttacatacgaattctcttttagaagttatattgcgttacagtattattattaagttaaatttgtaagcttttcaattaaaacactatcaaatgtggtagagttacttcttttttggtgaggagcgcggcgctagcttgtatttccgatggatccacaaatgtccaaaataatatataggccacaaactttacagtgtaaatatctctatagatgtcatcataaactagctataccgagatagagtttgtaccaattggccgagtacgcatgcatatgtacgtacgttgcctctcccgattggtacgaaaacggtagctaaaaatatgaggtcgttgatgccgtaacgcgatcgtttcaacaaagaaaaaaaaaaacaacacagctatacagctagctttgtccctaaattccggacggaacatgacaaattatttaactcaaattttagtcgttcgacaccctttcgtttgcatatttcaacggctccggtcggccagcaggacacgatctataagcaaggactactagctatacaaacatcacgcaacaagtacgtacgttccacccttttcattgcggcaaaaggggagtaattgttggaaatatggttataattctgcatattttaatccataataacataataataaacatgatatttataatatgagtagatctagtgacggtactgaacaacatgatcatgccactactacattgattttcctagacgcctcccgttttgtttccatgtggttcgtaagtggaaccacacaggaaaatgggggaccgacgccaggccatcgcccgcacaagaaaatcaatcacataacaggcccgcacatgaaaataaacttatttttgcgtgcggggctgttaactgacccgtacatgaaaatacctcgagcgatatcctccgcgcccctccgcccactgcctccctccctactcactctctccctctctcccactccactcctctcctcccactccactcctctcctttcctctcccggccgaccggcggcgacggacaatacagcggcggcgctcggcccctccctccctctccctcggctacgggcgggaagaagggtgggcgaccacggcggcgcccggcccctcccctccctccctttacagatccggcggaggagaggcatggggccggcggatccgacggcgcgcggcccctcccctccctccccttgcagatctggcagaggggaggcaggggcttggcgaatccggcagagcggtgagaggcggcgggagggagacggcctgcgcccctcgacggctggaggcagtcggacagaagtggcccacacccctcggccgcgggaggcggtgggacggaggtggatctggaggtgcggcggcgtcagcggcggccgaccggcatcaggagagttgattcccctgccctccctctccctcggctccccttggctcccctccctcctccttcccttgcagatctagtggaggggaggggcgtcttcggctggcgacgggagcgggcggcggatccgtagccggcgaccgcaggggcgacggcggcgggcctcgactagggcagcggcggcggcggcagattagggttagggttttgtttttcttttttttttgtttcgatattttattttctcgtgcgggcgtcttaagtgcccgcacgcaaaaatccgattttcacgtgcaggtgaggcatgattttcccagacccctgggcgcgtgcgggccgtccacccgcacgccaaaatcatattagccgcacgcaaaaatcggttgtgtagtagtgtgctttttataaaataatcatcaacattcacatgatagcacaatactgtcattgcgatgagcattaacaataaaacatatagggtgtgtttggttgctcgcatcccctaagcatggctcatctctctcatctaggctgaatttgacctagctaagagcatgcacatgcagttgtttggttgtttacattagtctagccaggttgacatgagattgtatttagttactcgcatgagagatacggtttggaagagattgtgtttggttagttgtattgactcgagtgcggttacctattcatttagttgggtgagattacctatacacaatatatatatatatatatatatatatatatatatatatatatatatatatatatataattatattagttttttatttaaaaaattagataatcttttatataatattagatctggaaaatcactatcttgtctatataaaaatcattagtagtacatacagcgtttagttattatgagagaaaaaccgaaagaaaaaagaaagcggaaaacgagagaaaaaaagggaaaggggatcggcgttgcctcgtcgccatcagcaactcccttccgctcgccgctgtcgatgcggacatctgcctgtcgctcccctccactgcctgctaccgatgcgcccatattcccgtcgctcccctccccctgttgctcaccactccacccatctccccacgctcccattcgcccgccgctcgccgctccgctccatcagatctggaggccagtgattaaagataggagacgacggtgcccggcgattgaaggttgggggacggcatgaagaggaggagggatgcagcagcaggacggatcagctgttgtgctcgtcgttgtgccccccgtcaagcttcgtcgccttcgagccgttcgctgcctcttcgccatgtccatagtctcgttgcttgttgggtagaatgaagagggggagaggggcagggtggtaactccaatgcctgctcttgcatgcgtgggtgcaatgctgcatgtatgggtgcagtgcaatgcatcgcgcgggcctggctgggcagcgaagctcaaatcgagcgttcctgctcagcctggctaacggggcatttttgcatccactcagccaggatgggagctacgtgcaggcaaccaaacgaccatccactgcatccacgcatgcatgcgagccaggtaccatgcaggcaaccaaacacacccctagtgacaataggagagtggaagtatacctagagaatggtcctccgctagatgatgaggcagtattgcctccgttggtgttgacgttcccggatcagtctcctccagtagagccaccactccctgcgcctaagccacctctagcaacagcagcagagatgttgacgtaggggaagcagagcctgacgtagataacacagagccgtcgcacctgagagcgctccccaaaaacttgatcgcctgcctactcgtgtaggtacacaagaggacggacttctggaggcctgctcgtcccgtttacctgtgcgcgcaggtgaacaggaccggggaaagcagtggctagcgcaagaacaaaacggagaggaaacaacgaggaagcatggtgtgagaggatgaacgggtgtggcggattatatagtgcttactcgttcaggagtaattaaatcgaaactaatcggattcaactctgtaaattaatagcgaaatcaatccgttggaattcattcactcattcatacaaaattgattagccgaattaacatcgatttaattctcgtccgttacgtaattgattagccgaattaacgtcgattcaattcccgtccgttacaaaatagagagagagagaggagtagcagcaaccgcctgcctcgctttgtatcgcctctgcgcgcgcatgcgcgcgcatgtagcaatcctaccatcacctcaaccggtcaacaggggctctctaatagttccctatttaacttgagatttcctcaccacatttccaaggtgatattaatccccataacattaattggcctgaacatggcactctctttctctttcaaaacccctaaaacctattttctagtggggtttgagtgcatgccagttgtgggaagttagcaccccgccaaatataagaattaatcttgagcctctattgcaaagcactaccgtacttccacatgtctaatgggttaggcttagtttgtagcttagtctagtcatgaacaggatgacacatatagagatggatgaagttgggtgatagatatctctgaggcaaatgaaggctacacgtgcgggtgttcggtagtcgagatgttgtggcacatgacgggcatccgggtggtcacttccaaaggatgtcctgatgccatggagcttaaccataacctacctatcctaggaaccctggccgtaggcgagcgttgagtcggtacttttgttcaaggctaggatgagtgaagaactatgtcatgccatccgtccgtataacgtagtggtatgtggcgcgtggcaacacgttaggaaggcgtgtcctgtgggtaaagatgtacacctctgatcagagtataatctattcgaatagccatgcccttggttatgagcaatcctagcaatgtacgcaagttagtggtttccctcttaaaacttgtttaatcaactaaaacctggaatggatggcttgggttgacttgggatgagctggggcccagctatataaggctgtcggttcgatctaactcatcgtaggtcttgggttaaggcaagttggtgtgggttcacgaccttgattaataatctcgattagcattagggtcggatttacaaaattgccttgggcaactaaaatggtttgaaatccttgtttgttgtaaaactcaaccctatattattacaacttgcaccctcgccccctccccccattgtattaatcatgcacctctcggtttgctgagtactgtggttgtactcattatagctcaatcttccccctttcagtaagagaagctttggagaagaagttctaggtggagtcttagattataccccagttgagtgcctgtgaagatggagccgtaggcccgctagtccgcagctatttatttctgtttgtcaggccttaagtgcctttgtaatgatgtaaatattattgtcttttgtatcatgtttgttgaagtgtaccctggtttttcctaggacggagatcaaggcactagagattggaaaaaggtatttttccaatcgcgacaaaaaagggtttttcatggtagcacaatataattttcagtggcgaccaaaccatagattcgcttgtgaaaatgtaacaaaggggtggggggataaggaccgccagtgaagatcgatcctcgctggtggctgggtaaagtggaccgccagcgaagataacaccatttaagtgtaagtgtggtgcttagattattagatatcattattttttgaggttatatgcaacgagtcagcagaggtgggctgctgatggtgacagctcagtacgggtattccttcacgtccgtatataatcctaagacattttccctgtatgggtactcctccgtattcatttccggtcagatggccatgatggattgtcgtaaggaactcggcaatctggggtggtctctcgaaacaccaggagggcatagtgctgtggtggttggacccgtttggtgttatttcactggatttgtaagcccatccacccataagtctacctatcaacggatttcgatttatggttcggttaatttccatcgattctcctccaattatgtaaagttctctgcaaacaaaaaaaattccaagtacaagtggagattgattattcttaaacaaaatatgcatgcaagcatggctagttctcctttattttggatatattagcggtcgaaattcgtctataacaaccatcaacaagcccccccccccaagcttgaacctttgctcgtcccgagtaaaggattcacaaaaacaaacttaagtattgatcaggagttgctaccatgatgtatatctcaaaggtgcaggtgtaaagtatgagtattctcagtcaagttaagtaagtaggcacagtggcttacccatacggccaatacccgtgggacacatgcttctccttatcttgagcggttgggagacaaaacagttggtagagcactaatcactcattctttatctaactttcattccggaggttttcaaatgattttgtaaataaaaactaagttcctcaaatgattctctcaatcactcaaattgtataagtgcatattcctcaccaagatgttgccattttgattcctattctaaagtcatatatgtggagtatggtagggatcaaaggacacatacttgtattcacatttattactaagtcaaaaatccagaccaaagcagatagcaaaacattatacctttgatcaagatcgtgcaaaatgtgtgtggaatatggtagtgaaaatggaagggatatatgaatttactccttggtgcatacctctttctccatttttgaaagcatctgagagagagtctttttgcctaactctttcttttaagaagaatattttgagacagtccttgccccatattttgtattggtacaaattcttttcttctctctttcttctctctctctctctttagccactctcctctttttatttagcttttagaaaaaagaggcataaatatcatggagtatttatttggtggatgacaaatagatgaagtggataaaatggatgaaatgaatgctagcttgatcataaagtttaacatatgtgtggaagtgtgatcttgatcaaaaagtatgagaaggatctaacacaggtcacaaaatgttgacaaagttcaatggaagtgcaagcaaccaaaatataagattttgcaatgtcaataatatttggctctggtaggaatttatatcaaatgaggaacttttagagtttattttgaaaaataaaaacatccggaattgcagtcaaattcagaacaagattatagtaactctattttaccttatcatatctcacaacaacttaggctcagatcatgcaatgtgcaactcacatctctcaggttcccagataatatttggccttcccgacttaaaagttgagacaatacttaactatgaaccaatacataagagatataaaacagagcaaatattcatcatttcaacatacagatctaagcagtcttacctagcatgataaaatctaacctatatttttgttcttttatgtttttcaaatttttatgttgttttctagatataaatgcaatgggaaatggaaagatacaagtcaccttagcgggagagaggcctctcccccaagcttgcttgttgctcagggtccagggtgaggatagaatccctgatggcgaaagtaggcctgcaagtcggcctactattgatgcatcatgtcatcaaatttggagagtcatgcatcaatattttcctgccacttatgtgcttgtgctatgtgtccttcgagcgtgtactggatttctcctgcttgcagttccagcgtgcccatcctcctagtgagcttacccaggtttcctcgagaggaacttgagctccacatcctggagaatgggggcatgctaatggaactagaagaacgagagtgcccccagtgtgtgtcatgaggcgcttgccaccggctgtcaatcgcgctttgccaggccaaacttccggcgtcgtggtatggaacttgggtccaaccaggagcatccttggttggggcccagtcggcctcacacatcatcactggtggtgaagacgttgattcctcaggttcttcccatgccatgttgtgggtagccctatgcgaagtacctgcacgaaaatcctctatcgtctgcaaaaggatggttagctcttggcagttgtacaaatgatacctcgggttaggtaacgggattcatttgtatagccaagaaagaaaaacacaagtgtattatctggcccgtggttaactgtatgaccttgcactaaataagcttcatcaacataagaacgaattgtggaaatataggcaattagattaccctgtataaccccaagtccattggctatgcgagtacctaaagaagtgcattcaataggaccagtaaacttgatattttctaaccactggcaaatcatgcattgcacaggagtaaccttaatttttctaaccatggaaaacaagataatcaactcatcctcatgaatgggtctaagatcagctctaaggaataaagtcatgccaagccatttatgcataagctgtaacaaccggaataaagtcatgccaagccatttatgcataagctgtaacaaccgtccctcaagaatcacgtagccagcccatcggacgggcgggcccacttacacatacctctccagttacacttccatcatcgcttcgtgtaaaagggttaagccgggagtgatatggttggagggacaagcccttataagtttgttttgctcttgctaaattagcaaggtggtactaaacatacacacacagctcacatgggccacacaggtctaatcctaatttggtcgggatgtcacataccccccccaccctctcaaaggactcgacatccccgtcgcccaacttacccatgtagccacacgggaatataggcaaatgtccaagaatacggcccctcttagcgcacgtctatacgtccagtgccagcgccatatggagcccacatgcgccatacgcccgcacattgacccgtacgcgcaaccgcgaggatcggctctgataccatttgtaacaaccctccctctagtaccgcgtagccagcctatccgacaggcgggcacacttacacataccaccccacttacatttttatcctcgcttcctgtaaaagggttaacccgggagtgatatggttggagggacaagcccttataagatggttccactcttgctaaactagcaaggtggtactaaacatgcgctcacaactcacatgggccacacaggtctaatcctaattggcccggatgtcacataagcctatgactagggttgtggatgtcatttgttctagactttttgcagaatgatgcaaccgaaatatcttcccaaaatttgtgtttttcaaaagcagaagttgcattccgaaaattgattttacaattatggtgaaaacccaaaagtagacttaattctctcgaagaaagatgatactccttacagaaaaactgaaaataaatgccatcggctacctctagcaaggtacaaggaaattgcaaactaagcaaacgagaaccaggcttatctaccacaacaaatttctcccatcctacccattccaaacctcacggaaatcaagatccatacatacctttcgaagcagttcagggtcgtatgctcgggtgtgagcaaacgacctatccttgagcatatggtaggcttgcatctctcgctcacccatgagatcgagatcggagtcactaagaagtctgggtggaatgtccgcatcatccatcgaaacatcgacggatgaatgtgtacccgactcgtcttggtgatagcttgattgagagcttgatcccttcttgaataggcgagtgatcctctcttcatgaccacagacagagcaagaacacaaggcgaactcgagccacacaggcctaatcctaattgggtcgggatgtcacataagcctatgagtagggttgtggatgtcatttgttctaggctttctgcagaatgatgcaaccctaatatcttcccaaaatttgtgtatttcaaaagcggaagtggcattcggaaaattgattttacaattttggtgaaaacccaaaactagacttaattctctcaaagaaagatgatactccttacgaaaaaactgaaaagaaatgccatcgtctacctctagcaaggtacatagaaattgaaaagtaaggaaacaagaactagactcatctaccatagcaaatttctcccatcctacatgaatgcgctgatgaagcctagagggggggggtgaataggctgtccctaaaaacttaaaaacaaatcgcagcggtaaaattcaaacagacccggaacttcctggtaaggaactccggaacttccggcctgccaggcccggaactttcggtgttcttaggacaggaacttccgggttacagattgaagatgaaattcaaatttcgaaacaggagactaagccaatcttatcaagatgatgcacaggtattctaagtaggagatagatcacagaatcatccacagaaacatcacagaaagagacaagagcgattttttcccgaagttcggatcttgcgatcctactctccgttgaggagctctaaagagctgggtctcaattaaccccttgcctcacttgtgcaaaaaccccagaggaaatccacagccttcaaccccaaacacccctaggcaaatttctaaaattgagtgaccaccaagatccaactcaacctacttctagaaatccgccacaagtgtgggttgctctacttggaaagcctctagaatctcagcataagaacttcactaacttacctcgttccctttcggaggagaggggatccttcacaaacttacctgggacatccacaatatacaacggatactcgcggtccacacctaaccgtctaggagatcatctccaagagtaataagcaccgagatgacaacccacgagatattccaagtgctcacccaagatcctagtcttcacacctctccaaatcttcttctctccctctcaatctctctctcacaaaaattaggctctagattgagtggagaaggcaaaaaacacttgggagaggctagcaacagctctaggtttgaaatgtgaaagtggaatggctaaagaacgagctggaaacgagctgtatatgtataacggctaggtgatgtcatctagccgttactcacaattttgaactggaaactagatagtaagttctggacctggaagacaggaacttccggactacacttaggaaaatctttttctcaagaccggaacttccggacctggaagacaggaagttctggacttgcacttttggacagatggagtatttgcaaaaatgactcctagggaaacttgatacttggttcacactaatagcacttgacatatctcagagcatcacctggaacccctcttaattgtacggtttttcctaaaaactcgattgcaatacataaactatcctatgcacttctcgagttccggtccgctttggttttatacttttgggggggtctccaagcttccatcttccacaccttggactaatgcacctgaaagttactcaatgaactcattagtcccttaaccacatttgtcattaatcaccaaaacccactaggggaattaatgaactttcaatctccccctttttggtgattgatgacaatatggttaaagcttacaagagattgatataaattttgttttgaatggttagaggtgaatgaaacccccctttagtatatgcatgtggaagatacaagtgaaactcatatgcatatatataagggagcaaccgaggagagtttccttcatccctactcattcgtgggatgcaaataagcagaagaatagatatgatatgcaaatgatatgacataatgagcacttaaaaggaataaaatcaacatcacatcacaaacaacaaataagacactcatagcataaatgaaatgcaatatatataaagagcatgtccgtaacagtcattacatccacacaaatagagcattattacgtgtccataagttcataagagtagaggccaaaggactgccaggtccggaacttccggataaaatacccggaacttctggacaagctgacaggaatatagcgagggagctgccaggtctggaacttccggataaacagacagagcaggcagcaagctgtaatgaccaaaattttgacccccttcgattgcaattttctcccccgttggcatcaaggcaccaaaaagagacaaaatcacaagggaagaagaggatcaagcctcatcatcatcgccatcagaaggaatgatctcggtgtcgccggagtgaggtgagtcaatgtcttgcccggcgatgtctactgcctcatctggatctgtaggcacattctctgtaggtgcatcggactcctcatcatcgctgctctccttggagtgggaggactcctcattgaagaaatgagaagtgccagagggaccctcaccactagcaatgtcttgagcagtctcataagcagcaaaaggatcaacaaactcctcttcatcagaaatattagagacatccttgcctgctgcaatccaatcttccttttgacgcctctctatcttcttcactttcttagctgtcttagcacacatgcaaaagatagcccggagagccttctttatgggggaagaagactcagagcgctgtggagctgcagaggaagaacgagcagctgaagtagaagcacgagtcgccctggtagaaggaggagctgaagaggagggaacatgaggacgaaaaggcttgtgctggttgtccttgaaataactaatcccaatttttgcctcaatcatcttcattatataaggagcatagatacaacccctctttagttcacacactatctcatatatctcactccagataagcttcatgatgctgaaatctggcttgttgtagcgtatgcgactgaggaggagcgcatgcctatctggaagtgctgtagtatctcccactttggggagcaatgaccacctgaagatagaataaagcactctatagtatggacgcaacccacgagtagtccccaaacaatccttgggagcatccttctcatacaggaaagtagtgctggtcggtgacaaagcattttctacaaagatatgaggacgactcaggtcatcatcatctaactccagagctgcagcaaactgtgccatagagaccctatactgctgcccctgaatggtccacttcacaaattcaatgcccttcttggtggtgccaaagaaagcggtggagtataactgaccaatgacttcctcattccaggaatactgcaaggccaacagatctgccacgtgcttgcgctcacacaccttgcgtacctcactgaaaactaagttgttctttaaggacatgtactgccagtctagccacttcatctctaccactggatgagatcttcccatgatcacagaattataccaatcaacttgcaccacggtcctgaatctgtcatcctgagagtcagcaggcattgtgtcaggactcaccattctgtccattccacacttgagcagattcttcaaatagttcacacttggacgtctaggatcaggatcaacaacccttgtcttgtaaagcctcaaaggattgctctcagaactaggctcatcctcattgccaccatcatctgacttagatgcaactggagagggagagcggggagcatcaccaatgacaatgctaccagccctcctagaatgaataggaatttgactcccactgtaaaaatttccaactttttctttgcccaatctcctcctaggaccatgaaccgggggactcgagtcagcaggaacatcctgtgaaagcttctgtctcttctcatgaggcatactgaccactgcaacaagaatcaacaaggttgaagtgcaatggttaaaataaaaattggaggaatcaaggtttgctggctggctggatagagaccggaagttccggaccaagaacactggaacttccggcctgcaaaactaaagcacagaggattcaaacaggccagtgcatgtgacaaaatcctatagatcggcaatctacaaggtagcaggaacaattctatccaaaaggttttctccctaggttcacatatttagagatcggggcaaaaacatgatgaaccaaaagtgaggatcaaaagtgctaccttgggagaggaaattgcaaaacgatcgcgggatgaaccttctagccaccaatgtggttgattccacggagaggaatcaaatttccatggttggaagtgaaaatcgccgagaggagcactgtagcggtggctagggtttgggaatcgcggaggagaagaagtgaggagagagataacagactcgggctccccctgggtatttatacccccgacccccggatgttccggactagggtgaccggaacttccggcctgacagaacagagggcagtcaggcccaagttcaaaggaatagacgagaattcaacgattagaaatagaaacctatggacatataaagacttatgatgcatatgaccagccaacaatcatcattacataacaatggtcaatatacatcacaagacggggataaaaaccaaattttcgcaataaaaacacacacaaaaattttcgcaaattttcacaaaagggtttttggatatgagggggaatgtttaagttttatacctggtatcaagaccatcttctaccaagaagtgatctcaaaacacaaaagctctttttttttaatttacattttattgatacatgttttgctatgaattagacaaccacccatcacctaatgttacgagagtctaagatattgagttcactcctaagctcgcacaatcttttctcatctaaaggcttagtgaaaatgtcagctaattgggtctcggttctcacatgggtaaggcatatgtctcttttagtctcatgatctctcaaaaagtgatggcaaatatctatgtacttggttcttgaatgttgaacgggattattggctattttgatggcactctcattgtcacataggagtgtgatcttggtgaagttatagccaaaatcttgtagggtttgtttcatccaaaggagttgggcacaacaagaaccggcggcgacatattcggcttcggtggtggataatgcaatggaattttgcttcttgtatgaccaagaaacaagggaccgcccaaggaattgacaagtcccggttgtgctttttctatcaaccttacacccggcataatccgaatcggaatagcccaaaagctcaaagtcacaatccttaggataccataagccaagattaggagtatgaactaaatatcttagaattctcttgacggcaatcaaatggcactctttaggttccgcttgaaaacgggcacacatgcaaacactaagcatgatgtcgggacgagatgcacataagtaaagcaaagatcctatcatggagcgatataccttttggtccacacatttaccattattgtcgaggtctaggtggccattagtaggcatgggcgtcttgataggtttggtatcctccatcccaaacttcttgagtatgtctttcacgtacttagtttgagagatgaaggtcccctcttgtgcttgcttcacttgtatcccgaggaagaaggtcaactcgcccatcatagacatctcgaaacttttagtcgtgatactactaaattcttcacaaaaagaggcattagtagaaccaaatattatgtcatcgacataaatttggcatatgaataaatcactcttaaattttttagtgaagagagtagtatccgcctttccaatttcaaaaccatttttcaaaagaaaatcttggagacattcataccaagctctaggggcttgttggagcccgtagagcgccttgtggagcttgtacacatggtttggcaactttggatcctcgaaccccggtggttgctccacatagaccaactctgagataggtccattaagaaaggctctcttgacatccatttggaataacctgaaatcatggtgagcggcataggctaaaagaattctaattgactcaaggtgagcgacaggtgcgaaggtttcaccaaaatcgagaccctcgacttgggtgaatccttgcgcaactatctgggctttgttccttacaaccaccccatgttcgtcttgcttgttgcgaaagatccacttggtgccgacaacattttgcttgggtctctccgccaaagtccatacttggttgcgagtgaagttattcaactcctcttgcatagccatcacccaatccggatcaccaagcgcatcttccaccctggttggttccaaagaagagacaaacgagtagtgttgacaaaaacatgcgacacgagagcgagtagttaccccttttcttatgtcaccaagtatgttgtcgacgggatgatctctttggacagtgttatgtatccttggatggtgcactggggggatctaagcctgatcagtatgctctaaagtgctcgcagcatcgatcccatccacttgcgccgttggcatgtcttcactgccactggtccggaggttccggactatagaacccggaactaccgggcctggagatgtccggaggttctggtcaataggatccggaacttccggctcagcagacacagcacttgtagggctattggatgttgatgacggaggttgatccctatcttcttggtcatcctgcgtctcgactagtcgtatgtctccaatagccttagtacctatagcttgacttggatccacatcacctacaatatgtacaacaacttgctcaagtaagaatccctcatccaccttaggtgagaacttagatgagcgaggcatcttactcaaaataaagcatttgctcccaaagacacgaaaatatgaaacattagaatgtagtactcatggcctccgcccaaaagacatccgaagtcttgtactcatcaagcattgcccttgcggcttcaatgagggttcggttcttcctttcaacaatgccattttggggaggatcatagggggcggagaactcgtgcttgattccttcttcatcaagaaatttctccacttgagtgttcttgaattctcctccattgtcacttcgcaccctcttgatagtgaggtcatagaggttttgggcttgctttgcgaaacgcttgaagacatcttgagctttgcttttgtcatggagaaagtacacccaagtgaagcgtgaaaaatcatcaacaatgacaaaaccatacttgttacctccaatgcttatgtaggccacgggcccaaataagtccatatgaagaagctcgagtggtcttgttgtagtcatgatgtttttgataggatgcggactcccaacttgcttcccggcttggcaagcgctacacacacaatccttctcaaaagaaacattagatagaccaagaatgaatgtgttccccttttagaagggatgccaaattcctcattccaacatgggctagcctacggtgccatagccaacccatagaggatttagcaatcaagcatgcctccggattcactctatccacatcgaaatcaatgagatagagatcaccctttaacacccccttgaatgctatggaagagtcatctcgcctaaaaacggtcacatccacatcggtaaacaagcaattaaatcctaacttacacaattgagacatggataataaattgtagcttattgaattgataaggaggacattagatagagactgattcttggaaatggcaatcttaccgagacacattacctttcctttaccatcatctccaaagaaaatattttcacgacttccaccctgctcatcaagacttgtaaacatacacctctctcccgtcataagtttgggtcccttgatgttagttaccaaagcctttggcacccacacacaagtgcggtactcatcattgtaattcccattaaaataagcaaccactttgccctctgaatttttggaaattacatataaatcatagtaaagaccttctggccggaacttcctggcattataccaggaacttccggtcagccccttcgactcatcagaagtccggaacttcctgacaaaatgttcggaacttcctgtcttacagggcaggaacttcccgtcattttgcccggaacttccgagtgtctgaccagtgaagggacaagtcacctcacttgcttgtggagctttaccttctctcaaaaacatcaagcattctttcccatttaccatcacacgcttagacacaggacttccactagaaaacccgagcccgtgtccatccttgttaggatgagcggtgatggtcttataaagggcatcttttgaatggtatgtcttcatgtatccatattttaccaatgtgcccaacctttcattctctttcttaagagcttgcatagcatcaacattagtagcacaagagttcaaatcaatattgtaacacctagcacaatcattgctagtagatgggttggaaggattagaaaccacatttggttgagaggtgctattccaaagagtgtcaaattgaacttcaagatctttatgacttttgtctaaattagcaaatttgtcttgaagagtttcattgacatccctaaggatagctagagaaccattagccaaattaagctcattagctagttgttcatttttagcacattttgtagctaggctctcctctaaggcaaggtttcttttcttctcaagaataagcaattcttcttgcctttcgagtgattgttctttactatccaaagctctcattaacttagccaaatgttgcatagcgggtttgctaaagctctcaagcacatcatctaattcattatcactttcctcatcactagaatcaacatcaagagagatgtgagagggcttttgagtcatcaccttgcggccttgggccatgaaacaagagtagtggtaggagtcgtcgtcgtcatcactcaagttgttgaagagacgctccttgcttgaagaggatgacatgaaggcgacggtagcaacaccaccttctccttcaaccttgtcttttggcttgggcttgggcttgacctcgggatcttcttcatctccggagtaccacacctctgccacatgagcacgctctagcttcttcttgcctcccttagccttagcttcatttgacttgggacaatcggcaatgaagtggccatattcgccacaattgaagcaagctctctttgattgcctctttcccttgtcatcatccttcctcccttttccatagccactcttgcgaagaaagtgcttgaatctcttgacaataaaagccatctcttcatcttcaatttcttcacaacttgacacttcttcttgttttgccttcaaagctacttcttgatttttgatcatggcggcattcttcaccatttgcctcacttcacgagcttcctcttcttgcatcgcatgagacacaattattccaagaatgtcacttggggtgagcctcttgaagtctttcctttcccgtatcattgatacaagagtgggatttcttggaccaaaagcacggagaagtctcttgaccacaaagtgatttgtcatgtcctcattcccaagtcctttgatcttgttgacaaggatcattatcctatcatacatctatggaggtgtctccttgtcatccatcacaaatcttccaagccttccttccaacaactcaatcttggcctcacgaacggcgggtgatccctcatgagccagttgcaaagtatctcatatctccttggcctcctcaggtccatcaaccttgttgaactcctccggactcaaggtggagagaattgcattggaagcttgagcattgcggtggatgagttgctcttgctccgaggtgagctccatgtcatcattgggtacatcaatacctgtacaaacaactttccaaatacttggatgcaaagagattagatgcaacttcatcttgtgcttccaagcggcgtaatgtgtcccatcaaattgaggagcacgctcggaaggcacggagacaaagttatgaggaggaacattaagtttgctgtaatcaaagtgaatagtagctccctttatccttggtgctagaagcgtctcccttgtcatccatcccttcggttccctctagatgcgacatcgtggattactccaagcggtgaagcttgaatcaagagcaccttgctctgataccaattgaacgcgctgatgaagcctagaggggggaggggtgaataggctgtccctgaaaacttaaaaacaaatcgcagcggtaaaatttaaacagacccggaacttcctggtaaggaactccggaacttttggcctgccaggcccggaacttccggtgttcttaggacagaaacttccgggttacagatggaagatgaaattcaaatttcgaaactggagactaagccaatcttatcaagatgatgcacaggtattctaagcaggagatagatcacagaatcatccacagaaacatcatagaaagagacaagagcgattttttcccgaagttcggatcttgcgatccaactctccgttgaggagctccaaagagttgggtctcgattaaccccttgcctcacttgtgcaaaaacccagaggaaatccacaaccttcaaccccaaacacccctaggcaaatttctagaattgagtgaccaccaagatccaactcaacctacttctagaaatctgccacatgtgtgggttgctctacttggaaagcctctagaatctcagcacaagaacttcactaacttacctcgttcactttcggaggagaggggatccttcacaaacttacccgggacatccataatatgcaacggattctcgcaggcgacatctaaccgactaggagatcatctccaagagtaataagcaccgagaagacagcccacgagatattccaagtgctcacccaagatcctagtcttcacacctctccaaatcttcttctctccctctcaatctctctttctcacaagaattaggctctagattgagtggagaaggcaagaaacacttgggagaggctagaaacagctcttggttcgaaaagtgaaagcggaatggccaaagaacgagctggaaactgtcacgccctaaaaatcccgaatttataaattgttgtttaaatggaattattagaaataattttaaaagcctagaagaaaagatctaatgttaaggaataaattccaatataaaagtgggccagataaaattttattaaatacttctcttaattctatacttcctagatttttctaggatttatttgagccaagaaattatttttaataaatggaattgcatttcatgaataatttaaaaacaaaaagcttttaaaagtcctctcttggctttgggccgaaagtcggcccaagtctctttctctctccttcggcctgctcgagctcggcccaagccggcccgccaagccaagcaagccgcggccgccccttccaaatccggtcgcatctttgccgatccgatcaaattggtagaggggaaatgatctccttgatctcctctatcttttctcctatagaaacttcatctaattttgtttagaaatcgtcagattcgagttcgattcggattcgatttctcttctccaaccctaaaccttccatcgccgccgccggacgccgtgggcctagccgccgccccctagctcctataaaaggacccccgagacctcctctattcgccgccaccttcgccttagcccgccgttccttgtagcgccgcctccgcatcaggccgtgcgtcgccgtcgccgctgcaagtccagccttgcaccgccgccgttccagttgtcgtcatcgctcgggaaggccgctgtcgccgtccccgtccgtcctccgtttccgctgaagatcgccagagcatcgccgtcgtcgtcgacccgaacgcctccgccgcctcgacctcgctgccatcgccgtcggttgttgtccgtcgtcgttcgagccctcggtgagttcgccgcgtcgccctctacctgtaggtgtggtccgtttgtgccgccgcaccgtcgttcgccggcgagcacgaggtgccgagccgccgccggtgatgacgtcattgtcgacgtcagcaccacgtcagccgtagacccgtggtagattagatcgatctcggccgttcattcggtttagattagatctcagccgttcgttccgtagaccgtttccgtgcgcccggtccaccgtaaacccaagcccgctgacgcaataaatcctttttccttttcaaaaataattctttattgcgtcataatccaattaaaatgtatataaatgatttaatccgatttaatctttaaaaattcataactaattcatcttagctcggatttagttggttcaagtctataaatttttctaaaattgagatctacatgttaaaaatatccacatgtgctgtttatgattgtttatgtgctgttttggtgattttgctcttttatgcttagattccgacattcccggagagtccgattttgcaggagaagactttgaagaattccaaggccagcaaggcaagtcacacagatcccaaacaacctttgagcatgttgatcccgtttaaagctatggtttctattcaactattgcatttatttttgaatgtcaccgggtgggaacgacctatttcctttgttataaccttttgttattgattacctatactttgtcacctggttaataattggattagctagaacattatatggttttagctaaagtaattaggatgcttagccatgcttagagacattagctcatatgaatgggataattaatgatccactattacttaatgatggtttaatggtagctcatgatggttagtcgtgatagaatgattaattaagatgccaactaaaaaatggtaatcgtgggttgtgagtacatggttttgatggtcgtgctcatgacaattaaggaccggttcacgattttcggttgtgaaacattaaccgtgccaaccacaagccagcgtgggcaacggctttacctgttgtatagtatggttcattgtggggcaccagactgagaagtggcggagataagcccacgggggttgctggggattccatgccttgttttataagggggtgattatgatccaggaatggtgcactgctttgaattgtgttatgcggagggtattgtcacaatctctattcgggtacttattaagtatcgcgacgcatggttgacatgatgctgaggttgtgtcttgtgggtacagtggtacacctctggccagagtaaaactattcgaatagccgtgcccgcggttatgggcgggtctaacaatgtctttcgtgattagtctcacacctctccccataataaatgatgttgtaattggtaataacttgtttagctcctggtttggaatggtatatttctagtttggagatagaactgtgcagccgggaatgattgttcagaatggttgggcctatacaacgggtatgttgtatagcgttggattaatattgtttaattaaatactttagtatttttctaaattctgaagtatttattgaatgccatttatacaaatgagactatattatgccatcctttgttatcccctgcacttgcatatttgctgcatggcttgttgagtatgtcatatactctccttgcaatcattcatcagaggaggagttctaaagtgatgctgaaggtgtggaggattaggcgtagccctggtcaagctgcttgtgggatggagccgcctgtgctctttattttattttccgctgcttagatctttattgtttgagaggaactatctacctctgtaatgactttatgttcgtctattaattagaataataattgcactctattatcaatttgttattgtgtgcctcggctgattcctggacgagggtttacacacatgtaagcgtttggatttttggatagaaattccaggcgtgacaagttggtatcaaagcctccttgaccctaggttatgccaaatggttacctatagaagccctctaaaaatattgaaaaagtagaactgttctcctctctttctcttttaattaaaccaagctaatggtacatgcagattatagtctctataattgttctcattcaaaatttacttattattcctgtgttgttactactgtactaatggcccatttgccagcaaaagttttacaacatcatttattttcattcaatcatgttgcaatataataaacttagcatgttgatttaataactctcttttattttatttcttttgaaacctgctattcaaaagtgcaaagtttgtgatcctgttttcaactatttcaacttatcttgcaagattagtttactttatttatttacctttcactttgattttctaaatttattcaatttaatccaaaaccttgtgctattaattggataaatgtcttaactccctcctttcacttgtctttagatgccgcgcttcaagcctgagtacttgttcggtattgagggatttgtccaagagctgcgtgcgatgtcctttaccataggattcgggactgcccctttgtatgcccagattccacatgatcgtgatgaagagaagtgccgtgtcaaggtcaccttgaacagtgatcgtgaagatatcccatcggtgatgttcaaggctggagggggaagctatccacatgcttgtcaggaggtggcaaggatcgccataggagagctccgcggccgttacaatgatctgttggccgacactgagtatcgctaccatcctcgtcagccacagggaagtgaccgtgcgagctatgttgatcctgaaggaattgagaatgatgctaccacaagacatttggtcgagatgctgtgggccatggatgagtcccgcgttgaaatcgtgtcagctgctcaagctcgtgaagaccggaaccgtggtaagatctgcaagctagagggcaaggttgatcgtctggagaaggaattggccgaattgaagggagaagcgccaccacagaaggccagggttcgtcttaccgctaggaagagagctctttttgttccccgctaccagttggcgcccaaggttcatgtggtgtcaagagaagctgtcccagtggatcctcctgtcgttaatttaagcgatgatgaggaagaagattcaaagcgcacccattcaaaggttgagtggggtgctactcaagataataaggacgagccgaacgagccttcactcaactccgatgccaggaagacctagacgtcttgattaagtcgttgccttagttcgttgtgttagtttgcttgtttaagtttggttgtgtgtgagggtcttgcatgtggtttacatcattggtgggatgtaaatgcatgcgtttgattgctttcgagtgttaggaagtttgagttaagtggtgtaagagtcttcagttttatgtaataatgaaactaagttcagatcaataaaagtcaagttagtaggaattaattccctgtcataagtagttttcccccttgtttctcttcttgtgttcttgcctatgccagatggtgaacaccggcagcaatggaaatgggcccaacaacaacatcatcaacaacaacaacaatggagagaatcccacgcttgcccaagtcctagctcaacaggcgcagctcatgaatatgatgatgcaacaactctagaaccaacagaaccaggggaacaatcatgctcctcctcagaacaagtttgcagaatttcttcgcgtgaggccacctactttttctagcactaccaatctggttgaggccggtgattggctgcacaccatagaaaagaagttggacctgcttcagtgcactgaccaagaaaaagtctcctttgcttcacatcagcttcatggccctgcctttgagtggtgggatcatttccgtctcaacagggctactgctgaaccaatcacttggcttgagttcactgctgctttcaggaagactcatgtaccatcgagagtggtgtctctcaagaagaaggagttcagggcgctcactcagggatcccgttctgtcaccgagtacatgcatgaattcaatcgtctggcccgttatgctccgaaggatgtgcgtacaaatgaagagcatcaagagaagttcttggaagggttgaatgatgagctttcttacccgctgatgactggagattattctgatttccaggagttggtggataaggccattcgtcaagaagataagtacaaccgagtggaatagaagaaacgcaggattgctcacttcaaagctcagcaagggaatagtcagaggtcgcttctcactatgggacctcaggcagtgtcacagggaggatcttcgtctgttgtttgtccacagcgtcagttctacaacaacaataacaaccgcaaccaagctccacgtcctgttgcaactccagtccagcaccagcctgtcaagagggagcaagaaaacaagccaggggtgtgcttcaactgtggtgaaccaggtcattattctgacaagtgtccgaagcctcgacgtgtgaagaccattcctgtgcagaataactccaatgcaccaacgtcaaaggctcatgtcaatcatgttgctgttgcagaagcccaaggtgctacagatgtgattttgggtatgtttcctgttaactcagttcctgcaacagtgctttttgattctggtgctacacattcctttttgtctatgagttttgcgggaaatcacgggatggagatagaagatcttagatgtcctttgatggttagtaccccagtaatcatgcactctcatcacaacatagcccctctgtcagaatagagattcaaggtgttccatttccggccaaccttattctgttagaatccaaagaccttgatgtcatcctagggacggactggttagacagatataaacgtgtgattgactatgccaatagaaaagtaactctcaccagcaatgatggtcaagttgtaactgttcatgcattgccttctgaacctttaaggtcaagtctgaaccaaataactttggaagagattcccatagtacgggactacccggatgtgttcccggatgacttacctggtatgccacctaagagagatatggaattcagaatagatctggtaccagggacaaccccaatccaaaagtgaccttatagaatggcagccaatgaattagcaaaggtcaagagacaagtagatgatttgcttcagaaaggatacattcgaccaagttcatctccatggggagctccagtcatttttgtggagaaaaaagatcatacccagaggatgtgtgtggattatcgtgcactaaatgatgtgaccatcaagaacaagtaccctctgcctagaattgatgatttgtttgatcaacttaaaggtgccaccgttttctccaagattgatcttcgatcagggtatcaccagttgaggattaaagacgaagatatacctaagacgtcttttaccactcggtatgggttatttgaatgtactgtcatgtctttcggacttactaatgcccctgctttcttcatgaacctgatgaataaggtgtttatggagtacctggacaagttcatggtggtctttattgatgacattcttatttactcccaaaccaaagaagagcatgaagaacatcttcgccttgcactagagaagctacgagaacatcaactgtatgtcaagtttagcaaatgcgaattttggttgtctgcagtaaagtttcttgggcacgtcatctcagccggaggagttgccgtcgaccctagtaatgtggaatccgtaactaattggaaataaccaaagacagttttagagattcgtagtttcctgggtcttgcaggctattaccggaggttcatagagaatttttccaagattgcaaagcccatgacacgcctgcttcagaaagacgtgaagtacaagtggtcagaagaatgtgagcagagttttcaagagctgaagagtcgcttaatatcagcgcccattctgattttgccagatccaaagaagggtttccaagtgtattgcgatgcatctaagcttgggttaggttgtgttctaatgcaagatgggaatgtggttgcctatgcatctcatcagttacgtccccatgagaagaattatcctacccatgatcttgagttagccgcagtgattcatgcattgaagatttggcgtcactatctctttggtactcgtacggaggtgtacacagatcacaagagtttgaagtatatcttcatccagccagatctgaacatgagacagcggagatggttggaattaattaaggattatgacatgggaattcattatcaccctggaaaggctaatgatgtagcagatgttctcagtaggaaaggctattgcaatgctacggaaggacgacagttgccgtgggagttatgcaaggaatttgaaaggctgaatttgggaattgtcagtagaggttttgttgtagctttagaagcgaagcccactctcatcgatcaggttagagaagctcaaatcaatgatcttaatatccaagagattaagaagaatatgagaagaggaaaggctatcggttatttggaagatgagcaaggaactgtatggttgggtgagagaatttgtgtcccagacaacaaggagttgaaagatacaatcttgaaggaagcccatgacactttatactccattcaccctggtagtaccaagatgtaccaagatctcaaggagaaattttggtgggcaagtatgaagcatgagatagcagagtatgtagctgtgtgtgatgtatgtcaacgagtcaaggcagaacatcagaaacccgcaggtttgctacagcctttaaagataccagaatagaagtgggaggaaattgggatggatttcatcactggtctgcccagaacgtcatctggccatgattctatttgggtgatagtcgacaggtttaccaaagtggctcatttcatccctgtgaaaacaacatattctgaaaatcgtttggccgaattgtatatggcaaggattgtgtgtttgcatggtgttcctaagaaaatagtatccaatcgaggtagtcagtttacttcaaagttctggaagaagcttcaggaagagatgggttctaagctgaatttcagtaccgcctatcatccacaaacagaggacaaacggaaagggtaaatcagatttttggaagacatgttgagagcttgtgttttagacttcggtggaagttgggataagaatttgccttacgcagaattctcgtacaataacagttaccaagctagtcttcaaatggctccttatgaagcactgtatggttggaagtgccgcactccacttttgtgggatcaaacaggagaacgtcaggtttttgggactgatattctgagggaagcagaagagaaagtaaagatcattcaagaaagattgcgtatagcccagtctcgtcataagagctatgctgacaatcgccgcagggatttaagttttgaggaaggagatcatctgtaccttcgtgtcatgcctcttcggggagctcatcgttttcgcaccaaagggaaattggcaccgtgttttgtgggaccatataagattatcagtagaagaggtgaggtcgcctatcagttggagttacctcaatccttggcaggtgttcataatgtgttccatgtgtcacagctaaaaaagtgtttgagggtacccactgaagaagctaatcctgagcagatagaaattcaggaggatctgacttatgttgagaaaccaatccgtatcttggagacagatgagaaaagaaccaggaatcgagttatccgtttctgtaaggtccaatggagtaatcactcagaagaagaagctacctgggaacgagaagatgaattaaagtcagctcatccgcatcttttcgtcatctcttccgaatctcgaggacaagattctgtttaagggggtacgtttgtcacaccctaaaaatcctgaatttataaattgttgtttaaatggaattattagaaataattttaaaagcctagaagaaaagatctaatgttaagaaataaattccaatataaaagtgggccatacaaaattttattaaatacttccattgattctgtagttcctagatttttctgggatttatttgagccaagaaagtatttttaataaatggaattgcatttcatgaataatttaaaaagaaaaagcttttaaaagtccactcatggctttgggccgaaagtcggcccaactctctttctctctccttcggcctactcgcgctcggcccaagccggcccgccaagccaagcccacctctctccctcctctttcccgctgacaggtggggcccacctgtcagggtcgtcttcctcctcccgccgccagccgcgccctagccgcgcgcaagccgccgccgccccttccaaatctggtcgcatctttcccgatccgatcaaattggtagaggggaaatgatccccttgatctcctctatcttttctcctatagaaacttcatctaatattgtttggaaatcgtcggattcgagttcgattcggattcgatttctcttctccaaccctaatccttccatcgccaccgccggacgcagtgggcctagccgccaccccctagcccctacaaaaggacccccgagacctcctttgttcgccgccacctttaccttagcccgccgtcgcttgtagtaccgcctccgcatcagtccgtgcgccgccgtcgccgccgcaagtccagtcgtgcgccgccgctgttccagtcgccgtcgttgctccggaaggccgccgtcgggttcgccaagtcgtcgctgtccctgtcccgtcctccgtttccgccgaagatcgccggagcatcaccgtcctcgtcgaccggaatgcctccgccacctcgacctcgccgccgtcgccgtcggttgctgtccgtcgtcgtccgaaccctcggtgagttcatcgcgtcgccctctatccgtaggtgtggtccatttgtgccgccgcactgtcattcaccggcgagcacgaggtgccgagccaccgccggtgataacgtcatcgtcgacgtcagcgccacgtcagccgtagacccgcggtagattagatcgatctcggccgttcgttcagtttagattagatctcagccgttcgttccatggaccgtttctgtgaacccggtccaccgtgaacccgagcccgctgacgcaataaatcatttttccttttcaaaaataattctttattgcgtcataatccaattaaaatctatataaatgatttaatccggtttaatctttaaaaattcataactaatccatcttagctcggatttagttggttcaagtctctaaatttttctaaaattgagatctacatgttaaaaatatccacatgtgctgtttatgattgtttatgtactgttttggtgattttgctcttttatgcttagattccgacgttcccggagagtccgattttgcaggagaagactttgaagaattcaaaggccagcaaggcaagtcacacagatcccaaacaacctttgagcatgttgatcccgttcaaagctatggtttctattcaactgttgcatttatttttgaatgtcaccgggtgggaacgacctatttcctttgttataaccttttgttattgattacctatactttgtcacctggttaataattggattagctagaacattatatggttttagctaaagtaattaggatgcttagccatgcttagagacattagctcatatgaatgggataattaatgattcactattacttaatgatggtttaatggtagctcatgatggttactcgtgataggatgattaattaagatgccaactaaaacatggtaatggtgggttgtgagtacatggttttgatggtcgtgctcatgacaattaaggaccgattcacgattttcggttgtgaaacattaaccatgccaaccacaagccagcgtgggcaacggctttaccttttgtatagtgttgttcattgtgtggcaccagactgagaagtggctgagataagcccacgggggtcactggggagtccatgccttgatttataagggggtgattatgatctaggaatggtgcactgctttgaattgtgttatggggagggtattgtcacaatctctattcgggtacttgttaagtatcgcaacgcatggttgacatgatgttgaggttgtgtcttgtgggtacagtggtacacctttggccagagtaaaactattcgaatagccgttcccgcggttatgggcgggtctaacaatgtctttcgtgattagtctcacacctctcaccataataaatgatgttgtaattggtaataacttgtttagctcctggtttggaatggtatattcctggtttggagatagaactgtgcagctgggaatggttgttcagaatggttgggcctatagaacgggtatgttgtatagcgttggattaatattgtttaattaaatactttactatttttctaaattttgaagtatttattgaatgccatttatgcaaatgagactatattatgccatcctatgttatcccctgcacttgcatatttgctgcgtggcttgttgagtatgtcatggtttccgctgatagtcgatagtcgataatagccgatgccgataccagccgatagcgatagggtttaagcaatcggctatatatccaatgtagataatgatataaaggcaatcggctgatgataatataatatagcaatataatccagtagaaaccaatcggctaacaatatgaaatagtagaaccaatattgatccgaaggttaaagcacacatcggctggaggtccgatgtcataagatccacaagattagtttaaacagtgaaacctttgttgccatcggttaaatccaacttatatgtatatgcaatccctacaagccgatgcaacgtccagataacttatcggctagcaccccgataaaacattagcatgaacctatcggcttaacaagactgatattatcaacaacaatctagtagatcgaacctaaccgatgcagcacgagattgtaaatgataatctaatactcgatgagccgatagatctgtctaatatgatggatataacaaatctatttagaacagcattatgattgtagagatatatcggctaagataggagattagacttaaccgagacagtcccaactaaaccgatgcgtctctaaacacaatgcaattagagatagaattgagatatcaggtaggcaaatatatcaaccaaaccagagcgatccaagagatcgaatcgatgcagccttgaacaacaccaacgtagacgacagattcaccaggacttacctcttcgctggagatcgaaagccgatgcagccctgcgtcaggtgcccaagttccgccagaagataagtaaaaacctcagggaagagggtggcgatgcgccgagagtattattgatcgatagattgatagattacaatgaccccgggtgtacatatttatacccatagggagatactagttcttgtcggacaaaaatgaaactaaaaaggaaaagataaagtccttatcggacactaaacacactttcctaaagataaaaggaaactaacaaactatgcctaattaatcgataactgtcatgtcgcatccttcttgaactcgaactcttctagataagcttcctttgattgatccgactccgccaagaacacgacatcgtggtgacttaactcccatcggctgattctagaactttgaagtcgatactgactctaaaccgatggtaactttgggcttaccaaatttcactgtgaacactctgtaatgactttatattcgtctattaattagaataataattgcactctattatcaatttgttattgtgtgcctcggctgattcctagacgagggtttacacacatgtaagcatttggaattttggatagaaattccgagggtgacagatacgagctgtatatgtataatggctaggtgacgtcatctagccattactcacaattttgaactggaaactagacaggaagttccggacctggaagacaggaacttccagactacacttaggaaaatctttttcacaagaccggaactttcagacctggaagacaggaagttccggacttgcacttttggacatatggagtatttgcaaaaatgactcctaaggaaacttgacacttggttcacactaagagcacttgacatatctcagagcatcacctggaacccctcttaatagtacggttttttcctaaaaactcgattgcaatacataaactatcctatgcacttctcgagttccggtctgctttgattttatacttttggggggtcaccaagcatccatcttccacaccttggactaatgcacctgaaagttactcaatgaactcaatagtcccttaaccacatttttcattaatcaccaaaacccactaggggaattaatgcactttcactacagccttccaaaccttacggaaatcaagattcatacctatctttcgaagcagtttagggtcgtatgctcggatgtgagcaaacaacctatccttgagcatatggtaggcttgcatctctcggtcacccacgagatcgagatcggagtcgctaaaaagtcttggtggaatgtccgcatcctccatcaaaacattgacggatgaatgtgtactcaactcatcttggtgacagcttgattgagagcttgatcccttcttgaataggcgagtgatccgtctcttcacaaccacagacagagcaagtacacaaggcaaactcgagcaggggttaagctaatcaaggataattctacccaccagttagccttgcactagagcaaattgtatatgcaagaaataaaatcaaaatgcaagaaacaaacttgagaccaactttgcaaagcttaagatgattttgagagcaagaggaagagtgagagggagtgaaaatgagttgaatgtgggatgaactctcctccaccggtctattcacttatatagtgcatccataacagccaaaaactgtgatgtggggcccactagctgttgcctcagaaaaaatggcagccgaccgttgtgtggttggttcagccaaacccctagtgggcccaaccggccccacatttagctattgcctcccaatgcctatttgtgtgaggcctcgttgaatttggccaaaaagtttgtttttattattgctcaaaaaaatatgtgttttgtaaatttatctcaaatttatccctaatacaaaattttgaaaaggtaaacatgctttgatccaaaaatcaaattgatgaaaataaatttgtcatacataccaatttacatgttggtgagggacgagcatggccgtacctccgtcatgttcaacgtgatgatgcaacacccgactccggaggtgagggggcggatgtcgttttcttcactcatgacaccttttttgtcttaggtgtggcctgcggcttcttcgcagccggtgtcataggctttttagcctgcgcacctagctttccaggtgcactccttggacggggcctacccattgatgcttccttctctaggaagttcttcataaaggcaatgaggctgtccatcttaggcagcttcacttcgacctcttaaatattatggggattttgcccatatttgatcttcaccacggagcacagctccgtcctcagcctgaactcaaactactcttctttcccgttgatgcaaagctggatactcccagccccaacatcaatgttagcttctacgtgctaagaaacggacgccccagaatgagcggtgtctccttgtctgaatccatgttcagcaccacgaaatctaccgggatgaagaaattccagatcttgactggcacatccacggcgattccagatgggtagtggaccgaggagtcggcttgctggagccgcatcagtgttggtgccaacaccgtaaaattgagccagtcaaagattttattgggcataacgctgacgcttgctcaaaggtcgcagagggcttgatcgaagtgttgtatcccaattgtgcaagtgattgcgggacaccccagatctttcttcttttctagtagtcggtggatgttgacggccgttaccgaacagtttcgaccgtcaatactaccaaatatatgaagactagctatgcttgcaatgcattattccataaataaaatattctattccactatatgcatggaaaactaaccatgcaggggaagcaatcaaaatggaggagaatcgacagtacaacaatcgatcaatcaaacagacgctgtcgagaatcatacttatggatggataggccaagaactcagaaatgagacatcattctgacccaaaacattgtgtaccataaagtggggcccacatgacaacatcctgaagaaggttgtaggccagggttggccgaacccaaacccccaactggcccaatccagcccattttcggccagacaattactaccggcatcctatgtcaacctaccctttgaactgaactaacccctgcatagactttgatgtatagaagtaatatatgaatttttagcatagttctctcttatcatatcttctcttgggataaaataaatacgataccttggaatacacccgggtgaaatgctacaatggtatatccatgcgcttgcggatcatatctgtgaccataatataccaggattatttctagttctattactgagaattataatcccagtagtgtcgctaagaattaccaacaagcatttctggcgccgctgccggggaagataaatgatcaagagtttactacttgctaataagtttatatttacctccgtatagtcattgccctttgtaggcaaaccttgtttgttttctcttttatgtgaaaacagaatagtacaggactggttctgatcttccgaccaatttcatatcttgagtaactggtgaagtgaagccgaccctgtgtcattcatcctcaaggttactctatcggcaaccagaccagccaattctgcaccaccagaattgcacgatatggctgagaagaccctttgcaagttcgctgctccctctgctggtaacatgtccaaccaagtcagcaggggagatggtgactttgatttgaagaccagctaaattaacgatggcgcatgcttgcccgttctgtggcaagcctaagaaggatgcaagtgctcatttgcagcaattcctggaaagctgtggcacgtataccatcaaaggagtcagactctagctgctaccgttctccctcttcgggagagcagaacagtggttctacattaaccgtgcaacggtgaatacatggaataagcactcaacggcattcctctcaagattcttcccgatgggcaagaccaacgctcttcgtggaagaatacctagtatgcagcggacaagggatgaaaccattcttgatgattgggaaaggctgcaggaatacgtcaccgcccgtcctcatcatgggatggccgagtgtcccatcctgcagaatttcttcaacggattaaccctcttgtcctaggatcacctagacattgttgctagaggagcacccgtctcaaagacagtcagatgtcaacgatctgattgagaagaggttcccaaatatgggttggagcgaggaacgactccaaacccgtcaacgcggcatgtacaccgtcgaggggacgaaaatgccagccactcagttggatctccttatgaagagactggacaacaatgagaaggacgccgagcagggtaccgttaaggccctggactctcacatgacatgtgaggtctgtggcaataacggtcactctgggacggatcgtccgaaaacccgtgagaacgtcatgctcatgaacaacaacaacggatatcgcccacaaggagaccaaggatggagcattgctccatggggtagatcaagaacgaccgaacccataaggaggtcaaagtaaaaccccgatggacggatagcctcaacacatccatgatgaacttccttgagcgggaagaaatgaggaaccgtcagtaccttaagccggcatccaagaagccgggaatacaggctggtcaacctgcgttcccagttacgaagaggccgccggccgcacctaagacaaagaaggtgtggcgagttaaggagaagacacccgttcctgtacctctggaactaggtgcctcatcgagcaaaattcattggaggcacggtcgtgctcgtcgcacatgaaaggatgtcgcccttgcccaggtaaattggtagttatctcatatttattttccatcacatcaaagcatgtttgaattttcaaacgcacattgagatttgaatttgaggcaatttcttcaaatgaatttttgtgagaaaaataaaatgcattttttggcaaaattttacacagccaccttcacactagtcgttggaccgtaatggctaaatgtggggccggttaggtccaccaggggttcggccgaacccctggttcggtcgaaccggcctggcaccggctggaagcaaattttttgcagggtagcggctagtggggcccacatgccattactagccgttatccatgcactatatatgcagctcggctaggagagggaagtcacaccactttaactcattttcactccctctcaaaaccttgctctcaaaattcattcaaagttttgcaagctcgcctcaaattcaatcaatttgctgcacttagtttagacactttgcatatacaagtttgctttagttcgctgcagggttaatcggcgggtatttgcttaacccccgtcagagtagtcttgtattcttgctctttgctgtagctatgaagaaacgacttttgggcatattcaggagacgatcaagctcacggacaagtcgacatgataagacgagtacaccttcttccgcggatgcatccatggaggaggcatacgttccactgaggctgtacgacaactccgatctcgacctcgtgggcgactgggaaatgcaagcctatcatatgctgaaagaccgaacgtgtgctcagacctgagcatacgactcgaccttctgaaaaggataggtatggatgatgagtttcatactgtttggcgtgctgtaggatgggataaattttcatgtgtagataagccgggttcccgtttgcttaccatgcaattttgatgcaccttactagatgtaggtgatggcatttatttctggtatttcacaaggggtaccatcttacgtggaaagaccatagcttgcatctaggctttgacaaaacatgcaaagttaatttcaggaatgcatttcctgattttagcaagcatatgttttggcaaagtatttcgggtctctcaacctgtagaaagcctagaactagtgacatccataatcctaccttggggctgttgcataagttgcttggtttcgtgctatttcctagagctgatatccggatagtatgaacttatcctcttgtatgccatggttagaaaaatcaaagtttcacccattcaacccataatcaagcaatggttagaaaatgtgaagttgtctggtcctgttgtgtgtaattctttggtgactcgtttagcatgaagagttgagactctgcttaatacacaagtatcttgtattcctgttacccactcttatgttaatgaggcctatttggttcaatgccacatactcaaacatggtccaaaagattatcttatatttttgtttcccggctatacaaatgagattccgttacctaacccaaagtttcatttgtataactgccgagaactaaccattccactccaagcggagttgcctcgagatgtcccacgcaggataacgcggcgtatggtgagagaagcaccgcaagaggcatcttccccttcaccaccagtgcagatgtaccgggacagttgggaccctaccgcgcatgcctgtggttggacccaattcctgcaacatgacgccggaggttcgttctggcagagtgccagtgacagcaggaggcatgagctgcaagggctgcactggggatactcgcgctccttcagttcaagtggtctacctccatcctcttggatgcatcactcaatctcctctcgagggcatctgggaggactcacccggaggacggatacacttgaactgcaggcagggaacatgcagcacacgctggaggatcatgtggtacagtcacgggaatagcaacagtctgttgatgcacaactcgcaaacttcaacactatgacgcaacaacagcaagttgactagcaagcgttttgccgctaccaaggatttgatatccgccatgagccatagcaagaagcaagcttggggggagatgtctctcccccaactaaggtaacttgtatcacattgcatgtttccctttcaaattgcatgtttaaatttttgcatcgcatttataaacctaaaaacaacataaaaatttgtaaaactaaaaataccaaaaagataggttagatttaatatgctaggtaaaacatgcttagttcttcatgttgaaatgatgaatagttgctctgttttatatctctcatatatgggtcatggttaagtgctctctcaagaattaaataaaagtagccaacaattatccgagaacctgaggtaagtgagctgcactgctgatctgagtctaggttgttgcgaataagagttgctatgaacctgctctatgtttgacttgaattccggatgttttatttttcaaaatgataaatttgaaagttcctcatttgatacaaattcctaccagagccaaaaatattcatattgattaagccatatacattttggttacttgtaattccattgaactttgtcaaatctttgtgacttgtgtagatacctttcacgctctatgatcaagatcatacacccacatatgcacacatatgctaagcttctacactggaagatagcatcaatatcatccaccatatccatgttatcattatccacaaataagctctccatccatgcttcctttccaaagaaaaatcctttgcaaaaataaaagataaaaaaaagagggaaaggtatggctatgagaaaaataataaattcttgctctcctaaaattggagcatgaaagaaaaaaaagagaaaaaaagaaaaggtagctataccctctctatgaaaattaaaggatattttggaggaaagacataagcacaaaggagaagcattttttttatccacattttattttccatcatatttttccaccatattattcaaacacactttgcacgatcttgatcttgagtatgattagtcatttattttagttcaagtttttgacttagtaataaatgtgaatacaagtatgccatgtttgatccctaccaagccgcacatatcaaccttagagtaggaatcaaaaaggcaaacatagtgaagaattcatattcaaacactttgagtgatctagagaatcatttgaggaacttggctttcttttgcaaaatcatttgaaaacttccggaataatagttgaatgaagattgggtgattaatgctctaattgttgttctgactcacaaccgcacaagacaaggaaaggcagtgtctcatgggaatcaggggtaagggtaagccaccgtgccaaacttatttgacttgagagagagtacccataccttgcatctgtatctttgagatatacaaccctgcagaaactcctaatcaacaaccaagtctttgttcctttcgtcctttactcgggacgagcaaaggttcaagcttggggggttttgttgacggtcgttatcgaccagtttcgaccgtcaatactacccaatatatgaagactagctatgcttgcaatgcattattccataaataaaatattctattccactatatgcttggaaaactaaccatgcaggagaagctatcaaaaatggaggagaatcgacagtacaacaatcgatcaatcaaacatacgctgtcgagaatcaaacttatggatggatgggccaagaactcataaatgagacatcattctgacccaaaacattgtgtaccataaagtgaggcccacatgacaacatcctgaagaaggttgtgggccagggaagccagccagggtttggccgaaccccctggttctgctgaacccccaactggcccaatccagttcattttcggctagacagttactaccagcattctatgacagttggagctaattctacctgaagaaaccgtcatggacacatggcaagaggagatgaaatatgctctttggatgcttgaccatgccacttgtcatgaggagagcaaagatgctcctaggatgcttggagcatctccacactcccaaggcacctcatgggctataaatacccctcctctcattcattcccacacacacctcaaggagaagatcaagagctccctcaagtattgtttagtagttagtgctagtggagtaggaaatagaatagtcttcatagtccacgagtcttcaggagattccgggtatggctttaatagctttcctctcttcttttgtaaaacttactgaattaatagaatattcttctttatacaagttcggtattttattccattcatattacttgagtgccgactttactttatacttgaatcaatatagtcatgtatctagctttccagataggtgtattggtgtgggtttagtgtccgattatttggttgctctatgtcggttgcaaggatgtagagtactatttagcaatgtaagagcggtgcttagattattagataccattaattggggttctatactgtggatgagaggtgggccgctgatggtgacagctcagtatgggtattcctccacgccggtatataatcctaagttaattccctggggagggtactcctccgtatttagccccagttgtatggtcatgacaggctgtcgtaaggaactcggcagtcaggggtggcttctcgaaacaccaagaggacactgggtacggggtattggttgcataactgtataatagcaagtatagactaaagatgtatgtagactagaagtataggaatgatacttttcttattctttctccacttagcttagactatattttagtgagagcagttcttagttctttcttctgtgtgtcaacctaccctttaaactgaactaacccctgcatagactttgatgtatataagtaatatatgaattgttagcatagttctctcttatcatattttcccttgggataaaataaatatgataccttggaatactcccgggtgaaatgctataatggtatatccgtgcgcttgcggatcatatctgtgaccataatataccaggattatttctagtgctattactaggaattatattcccagtagtgtcgctaagaattaccaacaatggagtatagcattgctacactgctccatgagtttcaccatctccgtgttcggcagtggcctcttgttgcttagaatatccttgaggtagtgagcgtacatgggtacttgcatcgcatccaagagtggtaccttaacatggatcttctgaattgtttcaacaaaatgagcgaatggtagcaagttggtgtcgcaataatcttgcggtgctaccttttcttgttgggcagttttcttattcctaatagtgttagatgggaatgcctccttgtcattcctccttgttcctgcaatgttagaatacggtggatcccgagtggattttcctcccctcgtagtgatcgccttcacattttctagagagggtttgggttgccccagaatcctcccagactcattagcagggaagagagcagctaattgccccagctgggtttctagcattttattaaaactcagctagttttgaaaagcataggcgaagccatctaacctaaaatttatattttgcaaggccttatcatttgcagctagctttttgcttaaagcatctattgttttagcttgagcaaaaacaaggtactataaggagggctggttattgaagttaacgttgttgctgtctgttaacagtgaaatttggtaatcggcaaagacgtcattggcttataatcattatcggctgcagcatctcggaatcagccgatgggagttatcaagtcgccaatagtcggattcctgctatattcggttaaggaaatcaatctactaaaggaagcttatccagaagagaccgagtttaaagaggatgcggcatggcagtttatctattaattaggaatagtttgttagtttccttttatctttaggaaagtgtgtttagtgtccgataaggactttatattttccttttatctttaggttagtttctttcttgtccgacaaggacttgtatcaacccatgggtataaatatgtacacccggggtctatctaatctatctctacgatcaatacaattcggcgcatcgccaccctttttactcctacttttgttttttacgttccagcgggacttggcacctgacgcggggctgcatcagtgttcaatctctggcgaaggggtatgtccaatgttccgtcggcccaggcaattgtatcatctacatcggcgtcgttcaaggctgcatcagtacattcgacctcttggattgctctggtttggatgatatatttgcctacctatttatcatatgtctctgttaatctagtcttagcatatcaatttagctctatcggctgcttctcgttttagggtttctgccggtatcggctaaatcgcgttgctagattagattagcttagaaatctaccaccctgaaaactcagtcaatggcttgattgtctagatattatgtttcttttcatacttagtgctgcatcagttaagtttgatctactaagtcgtgcttagaaccataatctctagcctgctgcttgactgccaataagggtttcatcggggtttcagccagtgagttatctggatgttgcatcggctcataaggattgcacatacatataagttggatttagccgatgacaacaaaggtttcactgtttaatctaatcttgtggatttaatgacatcggaccaccagccgatgtgtgctttaaccttcggatcaatacttgttctactatatcatattgttaccgattggtttctactgcattatattgttattttattacatcatcatcagccgattgcctttatatcattatctacattggacatatagccgattgcttaaaccctatcgctatcggctggtattggcatcggctattatcggctatcggctggaactactccatcggcttgtcagccgatcggctattttgtctattatttgcatatcttgtcagttgcaggatcaaactgactggcacgcccgcatctcatcaatctttagacctgcacaggagttaagcagatctcccaggccggtgtgttcgattttttcgtcaacactgtcacctccttggtagaacgggtagagctaataccacccttgtcctacttgcggacggtatccgttgttgttcatgaacattgactcttcatgggtcccgggatagtttgttccggaatgacccgcgttccacagacttcacacgtaatgtgtgagtccaaagccttaacggtgccttgaggtttgttcttctccggatcatccagtcatttcattagaagatccaacttggcggctagcatttccgtctacttgacggtatgcatgccgcgttgacgggtttggagtcgttcctctctccaacccatgttcgagaccatcttctcaattaagttgatggcgtctctgaccgtcttggagaagaaggctcctccagcagcagtgtccaggtgagccagggatgagggagttagtccattatagaagctttgtagatgagccactcgtccatcccgtgacgagggcatacagcgtcatattcttgcagcctttccagggcttcaggaattgtctcatgtctggtttgctgaaaactggatattctacaacaaagggcattggttttacctatcaggaagaattttgagaggaatgttgtagagcatttgttccacatgtccacccgttgcacagctgacatagaaccattgtttcgctctcccaagaagcgagaacggaaacaagcggagtctgatagcgtctgggctgactcccttcatagtgtaagtgctacagatctcgagtaactgttgcaggtgaacactggcaagctcatcaggcttgccgcataacgagctagcctgcgccattgtaattaggctggttttcaagtcggagtaaccgtctcctaagttgacttgcagcccaataggcatgttgtcagcaaggggtcttctcagttatggtattgaaggttggtggctcttggatggctggtttctctgtcgatagagtcttctgaggagggacaacacgtggtttgacgctcctgaagaaggcttctaggttatcttggaatttttttggcagattaaaaccaatcatgcactaccctgttttcacaacgaagtaaaaacaatcaaggatagcctgcaaaggacagtgattatacagaggtaaatataagattattagcatgtagtaagctcttaatcgttaatcttacttggcaacggtgccagaatgcttgtttatatttcttaacgatattactagaaatataatacccggcaacggcgccagaaatgcttgttggtatttcttaacgacattaaaacaaatataattcctagcaatggcgccgaaatattcttggtatatttatggttacatatgtgatccgcaagcgcacggatataccattgtagcatttcacccgggagtaatccatggtatcgtatttatttaatcccaaggaaagatatgataagagagtgcaatgctaataattcatatattacttgtacaaaccaaagtctatgtaggggttaatcaattcaaggggtaggataagattgacacacagaagaaagaaccaaggtactcttcacaaaaatataatctaggctaagtggagaatgaaaaagaaaagaatcagtcctgtacttcttgtatatggttaattcaatttacccctgctagcatacaatcatgcaaccaataccccctaactatgccctcctggtgtttcgagacaccacccctgattgccgaattcctaacggcaacccgtcatggccattcgactggtaataaatacgaaggagtacccataccaggaaagtgtcttaggattatatactaacgtggaggaatgcccgtactgagctgtcaccatcagcggcccacctctactgacccgcagcatataaccccaattaatggtatctaataatcaaagcaccatgctcacattattaaatactactccatgccgatgcagcagacatagagaaatcatagaaatgaatattaaacccacaacaaagcatatctctggtaagctaattacacaattatatcgagataagtacgaactgaagtcggtactcggataatatgaattaagtaaaagaccgaaactatatagaaaagaatatttcattcatactaaaagtcttacaaaagaaggaagagttactagagccatacccgaaatttcctgaagactcgaggactaagaatactactatattcctactatactagcactagaacaataaattaaacttgagagagcttcttgatcttcttcttgagtgtgtgttggagtagagtgaggtgaggtccttatataggctgacagttgtagcgattggaattgtccgaaataccctgcacccatcattggggagcaatcctagacgtccacgtggaaggggagcatcaatggcgcagctaggggttcggccgaacccagggtttggccgaaacctggattggcccaaatggcccacaaatttgcatgtgcgtctcataatgactccttaggccagtgttatggtggttggacccatttgatgttatttcactagatttgtaagatcatccacccataagtctacctctcgacggatttgattgatggttcagttaatttctgtcgattctcctctaattatgtaaagttccctgcaaacaaataaaattccaagtacaagtggagatagattattcttaaacaaaaatatacacgcaagtatagcttgttctcctttattttggatatattgacggtcgaaattggtctataacggccatcaacaaaaagataactagcgcgcgccgccaatgaagctggcgcacacacggggcatgcgcatctaacttcggatctcgtatgatatttttcatgcgcacgatgttcttttcgccattattttatttatttttcacatgatctttttcgtgaattttttgatcatgtgcaaatgttgagtcaaaagtttttaaaattttagttaaaagttttgaattttgagtttaaatgttttttaaaaattaagttgaaagtttcaaattcaagttgaaagtttctaatcttcagttgaaagtttttgaatccgagttgaaagtttcaaatcatgatttgaaaatttttagatccaagctaaaagttttcaaatcaatgtttaaagttttaaatctggactttgagagttttcaaatctacattgaaagttttcaaatcttgacttgcaagtttttaaatctaagttgaaagttttcgaaccttatttgaaaagatttcaaatcttggtttaaaaatttttaaatttgagttaagagtttgtttcaatcaaaaagaaaaagaaatgacaagcacggaggattttttaggggaagaaagaaaacggaaatgaaaacgggaaaaacgcacgaaaggttttctggtgatgcgaaacaacaaatgtgtaacagatacgtggaccaatcgcttcctttgcacaacgcgacttccaaaaacggcatgtacgcgccaattaggccttgtttagtttccaaaattttttcccaaaaacatcacatcgaatctttgtacatatgtatagagtattaatatatagataaaataaaaaaaactaattgcacagtttgtgtggaaatcgcgagacgaatcttttgagcctaattagtccatgattagccataagtgttgcagtaactcacatgtgctaatgatggattaattaggcttaataaattcgtctcgcggtttccaagcgaattatgaaattagttttttaattcgtgtcaaaaaaaccctttcgacatctaatcaaacgtccaatgtgacacccaaaaattttcttttcgtaaactaaacaagggcttagtcacccaaaaaagagtcattgatcctgtccatttttcgaaccattttctcggcccattctcaatagcatgggccctcctcgtgaagtttaatcttcgtatatacgagcacgttactaaccaagtaaagttacactatgaagttggttgccccagctagcttagcaaagtaaaaaaaaaagaaagagagaacaaattcattgcgttaaattaaatcaagatctactttcttttaatataaaaaatacctctaaaaatgctactaggcataaaggtattttataaaatgcatttttgcttgtagaggtacaaggcattttattgtaaagacatttttaaaatatctctataggattgtaaagtcatttgaaaaattgctatgtatagtattattaggttgatcgatggccagaatactacatttcataagaaaatcacacatgaagtaattttactaaaacaattaaagcatgtgccaactatatatactaagcaagaagcccatcaaatatagatatgttatcttctgattagagaggtcgaaaaggttctttccgatagaaaaaggagctagacacaaataaatttcaatcgatccgtaaaaaggtgacacgtctaatcagaagcttttgtttgtagcttcatatataagaaagatatggccagattcttaacagacggcgcgagatgccttttacattgctatccatattctcatcgtcaagactcgcaatcgagataattgagaaacagtgatcatggtggtggtttagttctgggtacgtagtgattacgcacttactcgggctttcttttcacatattatatggagatggtgacacaaaattcatatattacgagccccacattgttaagttgcgacttcgtagattccaaatacatgcgaagtacggattttatcaattcattattttttaaattcgacagaaaaatcatttatttctcaatttcaaataacttgcagcatggaattattaaattaaataaggaaaatgagacatatgaaacccacacacttacacataaaaatataaaaaaatactaataatgcacatttgttataaaaaaatactaataatacatcttcccctgtttaggttatatttttgttgaagctcttgccaattatcatctcccaaaatacctctctagacgctccccctcatagccaccgcttgtcctagcaatctctttacgtcaaaggtgaatcacccatcttctctctcccagacaacaaaataaaattcatatacctcagcatctaacttcaaattcagtaattggctcagtgagattgaagaaaacgtcatcggaaagcggttggattaggaaggaatatctgcgcccatcctaaggtgagaaattgccgttaatttagaaatatttgttgagtgatgtggaattgtagtccatgttaattattgtgatagaatttttgctcctgtgatagatacacgtttaagccatgttcttaattttgtacactttttaacttgtactttttcatttttcaggtgcacattttttaaactaaaaatatatactttttataaaattttaaattaaaacgttactgaaaaatcatattaataaataatcgaggtgagtacagtacatatatctatctttggattctcacctcaggcccttttcccgttgttggttttgggccacgtgggtgagcaatattcctaaacaaagctagggccatagagcccaccccgaaaccactacacctaccgttaatggtgaccccgtaatcgtgttttaggtcgttattcctgctgcttttttggtgtgtggcaaatgatacgcggacgtatgcggtacattaaattattccagctccggattgcacgaatcattcgatgtaaataaaaagtgattgaaatgaccaaaaggtagtcataatcaccaccccgaaaaaaataatactcatactatatgtttacgcctccaaaattgctaagcctaccagcgcccccacgtcgccgccattttccctcatgatttatctacagtatttataagttatttaaataccgtacaatttttctcctttctctgagacatcagcgtctccctctgtgtgtgcgtatgtattgtttttgccaaaagcatcatttgatttaatcagcagctgcttatccttgggatacgtagcatcagcaaaagcacactttgttactcagtgactcgactgtactattatattgtgggagttatactagtgctaattgcttatgttagagtacatactcctaaactggattagtattagtaacatgtactgtactatagtattgtttaattaataaataaagtagaattaagagcttgcatgctgttgctgctgtaatggtgttgctgtcccgagtcctgacttacacacacctctggcaatcagcgtcttttccatccatcttttcctgcaggaaaggggcaggtcatgtcaaaaccggacatttatcagagtatactgaatttaagcagcatgtagtatacataaaaagaattccaccgagacgaaaaaaggacacctttcttttagctagcacgcgaggggtagctagcctcgtagtaggatattacgctgaaaatatattctgcggcaccatgataggaaatcataaaagagtgttttggcctactagtactagtacaagttgtatcatacgtggagaggacggacacccacttttatatttatgccgtgtttagttcgagtgctaaaattttgtttaagtatatagatatacatttaaaatattaaatgtatactaataacaaacaaattacagatttcgccttaaactacgagacgaatctattaagcataattaatccgtcattagcaaatgtttactgtagcatcatattatcaaatcatggcgtaattaggctcaaaaaattcatctcacgatttacatgcaaactgtgcaattggttttttccacatttaatgctcgatgcatatgtccaaacatttgatgtgacggaaaagttgaaagtttgaagaaaaaattttaaatctaagcacggccttaggcttaatcgacttcggtggcagtcgagatagatcggtaaagttcttcttccaactttaccaactcacgtactccgattccgcacgttcgtttttgaaactgctaaacggtacatttctttaaaagatttctctatgaaagttgctttaaaaaatatattaatccattttttaaacaaattaataaatacttaattaaatcataagaaaatgtgtcgctccgttttacgtgagcgggaggtgagtttccaacctcacctcccgaacacagatcaagatgaaaataaaatcagtgcacgtaaaactaaaaatctattatagcgtataattaattatgttttattattataaaactaaaaaatatttatttaatattttaaggaaacttttatataaaaaggttttcaagaaacacactatttagcagtttgaaaatcatactaacagaaaccgagataaaatattgcatcttaattaggaaagaacggtgccgactcgtagtatgacctacacccttcatcacatgataaatcaacttctagggacaagttgcatatccaacatgtactcaaacgtccaagatagagtccatatacaaaatacacgaccattttacgtacaggttatccaaaccgaatctcaacttaatcaaaaccttcttatttttaaaattctccttcggaaacaattgaatccgtgtagataagatacttaccaacttatagagagtcttggaatagaaggaaaccatctaaccatgtcatagaactcacgaactctccaatagaaggaaaccatctaaccatgccatagaactcatgaactctccaaacttggccattctcatacgtcactttttcatcctgcacaaccttcagtaaaatccaaatcatgtgccgcatgatccattggaaagaatacttgataacctttctaaatgaccttttgatacattgaattcctcttgtttgatgtgtaaatcttcatactactggcatccagtattgcaccatatcctcattattctccccttcaaaatgagtcgtcatcgattcatgctggttgttaaagctttggtcgatgacgatgacaacgagcgaagaacacaaatttatagcaaccacactgtcatcccaacatggattcggatacgaacatgaaaaaaaatacagactcaacgatatgactaataaataagaaaacaaatatatccatcaagtgcaaaccaacaccaacaatcgataaagcctgatgagagatgtacaattcacccaactataccacaaattactattgtatgaccacacaacctagaattgaaatctgacatgtagaacaagtttgcaacatcctactaagacaaccaagcgctctgataccaaatgatatgggaggtgacccaaccttctcgacgtaggatctaaaacaccaagcagctgacgatgtggatgaacaacttgctgcttgtgtggcacatctttcatctcgccattacaaaaccacatgatgcagaagataactattgaaccgtcaatccaagcggaaagatagcacgatcttgatagtatcatcctattccttttctactggttgtgccaaaacataggatgaacgggtggcgagaccctcacatagttgtagcaaaaacttattttttattcataatgtagagtctcccttacaatggatgcacaccttatatagcaatctgaagacctctaaacaagaaaataactcattacatgacttggacatgaagaaagaaacttttgcaacagcaatcgtgtcctagtttggtagattgtggatgaaccacgaagaatatgaaggtgggaccaaaaccttggcatgggccataaaattagctttcaaacaagtactcgaacatccaaaatggagttcatatgcaaaatccttgaccgttttaccatgggactatcctggttgtccaaaccatccaaaccttcttattttcaaaattatcatttgaaaacaattgaatccatttagattagatacttgccgacttatggagagtcttggaatagtcggaaatcatctaaccatgcatgccatagaatccacaaactctccatacttgataattctcgcatctcactttttaaacccgtgcaaccgtgcaaccttcagtaaaattgcgactacttttgattggaacatccaaatcatgtgttgtttgatcccttggaaagaagacttgataagattttctaaatatgaccttttgataccttgaattccattgatttgttgcacaaatctgtagacaattgacggtaagtactacaccacatcctcatcaagatttatcctaaaagttgatttttttttactagtactatattctgctactatattagacactactttgtactacaaatttagattggagatatttagcttccaatattttgggaaggagtgagtagatgtttttctagtactacgaactaagggactattcactttgttgctaaaattaatcttacaaaagtttggtaacaaatccaaaagtggtgatctaaacatttccaaaagttacctcaccactaaagttaacttggcaaaggtataacaaatcaaataaaacctacacatcttaacattgccaaatatttacaatgtcaaaatttggcagtactaaaatttgattagggtgatttaggcatcacaatgaacaacccccaaattcatttagaaactatatgttttaaggaagcgtagatatttttacgaccataaatacgtaggcgataggtacatatcttttactccatccatgaacaaatataaatgatttattattcaatccattcaatcaaaattagcaacgtcaacaacatcaaattagttttgttaaatgaaacattcaatatatgtttatgatatgtttgctttgtgttgaaaatattactatattttttctataaacttaatcaaacctaaaaatgtttgactaagaaaaaagtcaaatacttataatataaaacagatggagtattatatatagtatatgtatatttaactttgaggataaataattactatattataaattttgtgaacttctaatatatttattgcacggatatatagatatatttttaataaattatagtttaaaaaattaataataaaacatatgcattaaactctgtgtcgatgtccaaaacgatgtcaccaaggtatgaaatacacaaattcactcaaaaatttcaatttgtgagtatatacctaggcataagaatttgattcatacctataccgagcaacaaaataactcaaattaaactttatttcacattccattattacatacctaactaatattatatgtttagatgctatatacctagaatcaaaatctatgaaaaagatgttcaaattcagttcaaacttgtttgaactagttagtaaataagttaatgttcataactaaccttttttaaaaaaaaatcatactcatttgaattaggtatatactcaatttaaaacttggtgcccagagccccggacaccatgaagccctagttaatgtatatacactccctccgtttcgagttataagacgttttgactttagtcaaagtcaaactactctatgtttgactaactttgtagaaaaaatgatagaaagtattataatatgaaacggaggaagtactacttttttctataaaattagtcaaacttagagtagtttgactttgactaaagtcaaattgtcttataacctgaaacaaaggtatatagcgcagtgacttttctcgtatccatatatatgcaattattttattgaacaaaatatattgttgttttgtgaaaatttgactgaatttagtctgttatccatatccaatgccaatttgaacttttctgatgatcctttaatctcaattccaccaatataattaatcactatgcctacttcatagtatattattgttcattgccttccggatgtcttttcaacaccacatgtttactgaggcttctaatttctattgtggtgcatactttaaatgtataatttgtgaaaattgacatattcttttggcaaggagtttgtaccacgtgcatttctaagtacaatattcaatcactaattttagagtaaatttcataaaactacaactatttagacaaaactatattttgctgtaacttcatatgaacatttctaaaggctgcaactatattgcatgcgagcgattttataaaaaataaaactacaacttaaaagtgatatgagtgtttgacatgtggttctttgacaaagttgcatttttctcataaattgtcaactatggttgtatgaccaatcaaagttgtagcaaattaattgttttgacatatagttttctgaaattatcataaatctaaattatcatatagttttctgaaattacttatttggtttgtagcatatttgttcacacacacacacacacatatatctatatatattcgaaagatcttaagttttattaggccagccaccgagttataatgtttattgtcctatattagttcttgaagcacaatcaacaacttcagaaggtctacatatatagccagattggaaagctcatcggtgtattcactattggtactcattcactattggtactgtcagcaccatttgttgtggtctgtaaatccatgttcatgagaataccgtgtctaagcactcgtatcacttctgtgatatgagtgataaatttttcaaacacagtacagttttgcactatttatgtccaacgtttcaccgttcgttttatttgaaaactttttcaaataagatggacggtcaaacattagacacggattttcacagctgtacttatttttagaacggaggtattaacatttcttttatctagcgcatatattttaatagaccaggcaagaaaaggaaaaatgataggtagagtgtcgatagactgtatagtacgtacagttgccaacagtccccgtttcttcagttatagacttttatatggctactggttacaatatctttatctgacgtccaactcttttcatattactacagtggaggaaaaacagaaaaaaaaaggagaactattttttttaatctaacctgcctaatccaaaatatatccaaaccttattaattaattacagctgtgatggtatatacatacacacacaattattttcttgtgcatgctaatctactatatacaaatggctctgtttgagtacaaatgcaaataattgtggttgaatggacttaattttttggtcctgtgtgttatccagcggagttacgttacagctataccgcattgatgaaaattaatgttttacatcaaccccgctatagaaaagtctctctctccggaatgatattgatatatatggtgctgcatgcatgcatgttcttgcgcaatatattacggtgatttttattcttctctgatcagtgatcactccatacattgcggggtactagtaattaatcaaccgtctggctgttgcagctagcaacgcatgcaaatcttactgtgtgttttgtgatgctcaaatctaactgttacagtcgtacttaccgttgcgccagacaagcacaagccacagaaaaggtcatacgcagtacagtactatatacagtaaccgttccatgcatgatgctaattatctgcatgtacttttacttggctaatgactccagattaatttgtgtataccacatgcatgtataccagcgtacgtattttcctgcagtatatactactactagtagttaggtacgtacgtacgtatgtatagccactagccagattggaaagctagctgcagcctgcaggtgtagcgtatgagagcatgtgaaattcctaaataattgagggtacacagccttttgctgtcctagaaacagtcgagaaattcaaccaaacttgccagctttttcaaacgcttatttatcataatgtggatgggttagctctagcttgcttgcttactcgctttctccccagtggaggagggaagtattgtacgccgcccttaattgtctgtctagcttgcctgcaaatactcactactgctacgtgtataatgcgtgcagttcatacgctgtccggcgcctcaccaaaactggtaccccaccccacccttctatatatgtttagccacgcacgccattgacaactactacgtcctttttttccccatatagacgccacagcaaaatactcaatgctactaagtatacgcgattgataactattagtatgtttggtaaaatgccactgtcacacggttaataatgacgatgaatttggcttgatgctaaaaaatgccctagattttactgactttgtcagagagatttgtagcttttcagtcgtaaccatttgtttttatgacttttgaattaactgatcatctggacttgagattttctttctccacccacaggaaaaaaatgaataattctatgttaaataagcgatgtgctgttactattgcggaggtacacgtatcatgggagcaggtcaggtagccgaaatggaggttttgtaaggtgtttatacggcagcggcgcggcggcaaatttgcgctgccgccggccggggggaacgaaaagggagcgagaggtaggaaaggctaaacaagggggagggcgtgggctctcacgccacggcctctagggccaccaactattccaccgcaataattgtgggagagaggagaggagaagagaggtgtgtggtggtggtcatgcatagtagccgaacacaatacacttgtacaatcctcccccttattttacatataggcctttgtaccataaagaatagactaggcattataccgagaggcattcctcttgtgggagtgggcagtcaaccctgccccaaagaccagaccaaaaaaaattaaagaaaagaaaaagggtgtagagaagtagtctggatagagagagagatggtggctctcaggctctcaagcttgctcctcctcttcttcttccataaattcctaggttgcccctctcctgctttctcttcttcttcaatctccatccccatcatctatctatccatcatccatcagaccagacccttcctcctctcccctgcctaccggcagcagcacccagcagtaagcccccaagcagtaagctatagctgcctgtgtgaggccccaaaatctctctactctccctttctccatccccacacacattcctccgatatctagtatatctccctactacaccatcatccaggctacattagtttggtctcttttttttttcttttataagttttgggtttttcctcaccaccaccacaagcgaggagttgcacaaccatccaaagggaggggagtgcaagaattgtgagctgccacaagtgatatttttccaattttgtttttgggcaagtgtagtgcactcactcacacactaggcaggggcaggggcagggcggcctataaataaaaagaaaaaaaaagagagagaagatatattactagtagtatttgctattggaagaagccaaaggcaggggaggaggaagagtcttcttctgctgctctctctcttctcttctcaattcatcctccttttgtccctatcaaaccctttttttctgtctctctctttctaccttggcattgttttctcgcaaatcttgctttctaaacccccaaaacctcccggaaaacaacccacccaccccgcgcgtggatggacggcccgcggccgccgccgccgcccaatgcgctgcgccgatcgcggttgtttccgacgaccacgccgccgccgtccgccaccgggggtctccggcattagaacccgggcagttgagaattccacgccgctacggcgggattggattagcgggcgggcggcggtcagggaagaggaggttctctcttgtggtcgttgccgctggaggtgatcgatcgatcggtcggtcgtctcgcggggcgatcggtcggcatgtcgacggccgccaaggaggaggcggcagcgtcggctccggcgccggcaatgggcggcgaggaggcggcggcgcgggcggcgcagaagcggtacgaggggctcctcacggtgcgggccaaggcggtcaagggcaagggcgcctggtactgggcgcacctggagccggtgctcatccccgccgccgacaccgggatgccgcccaaggccgtcaagctgcgctgcggcctctgctccgccgtcttctccgcctccaacccatcgcgcacggcttcggagcacctcaagcggggcacctgccccaacttctccgcgccaccgccgggcgccgccgcggcatccggttcgtccggttcgcagcatcagcagcagacgccacaggcggcgctgcaggcgttgccgccgcccaactcgacggcatcgtcccctatcccaatctcgtccattgcgccctcgtcgccgcgccacccgcaccaccactcgcagccccaacagccgcagtcgcatcaccaccatcaccatcactccggcagccggaagcgccactcgatgcctccggcgtacacggccgcggagcccgtgtcccaccaccaccatctcgtcgtcgtcgacccgtcgacggtttactcccctccgctgcccgccctgccgccgccaccaccgcaacaaccgcagtcggcgctcgtgctctccggcggcaaggaggatctcggcgcgttggccatgctggaggacagcgtgaagcggctcaagtcgcccaaggcgtcgccgggggcgatgctgccgaagccgcaggccgacgcggcgctcgccctgctcgccgaatggtttctcgagtcgtcgggcggcgtgtcgctgtcggccgtggcgaacccgaaactccggtccttcctccgccacgtcggcctgccggagctgcagcggacagacctggcgggggctcggctggatgcgcggttcgccgaggcccgcgccgacgccaccgcgcgcgtccgcgacgcgctctttttccagctcgcggcggacgggtggcgggagcaggtggtaactctgtgtgtcaacctcccaaatggaacatccgtgttccaccgcggcgtgccggtccccgccccggcgccctcggactacgccgaggaggtgttgctggacgcggtggcgtccgtgtccgcgtctggctcctccaacgacctgcaccattgcgcgggcatcgtggctgaccgcttcaagtcaaaggcccttcgtgatctggagaacaagcaccattggatggtgaacctgtcctgccaaatccatggcttcacccggctggttcgggacttcgcgcgggagctccctctgttccgctccgctgcggctaaatccgccaagctggccgcctacttcaatgccaagccgacggtgcggtccctgctgcacaagcaccaaatccaggagctcgggcatgcgtcgcttctccgtgtggcgcatgtgccattcaatagcagcggcagcgactaccgtgcggccttcgagatgctggaggacgtgttgacctctgctcgcccgctccagctcgccgtcttggaagagtcctataagctggtctgcatcgacgattcggccgccagggagatggcggacatgttgcaggatgggtcattctggagtgaggttgaggccgtgcatctgctcgtgaagctgatcatggacatggtgaaagagatggagactgacaggcctctggttggccaatgcctgcctctctgggaggacctacgtggcaaggttagggattggtgcgataaattcaacactgatgagggcgctgccctgaatgtggtggagaaaaggttcaggaagaactaccatccagcctggtcagcggctttcatattggatcctctctacctaatcaaggatgccagtgggcgctacctcccgcccttcaagttcttgactcctgatcaagagaaggatgtggacatgctcatcaccaggatggtgtcgcgggaggaggcgcacattgcggtcatggagctcatgaaatggcggacggaagggctggacccgttgtatgcgcaggcggtgcaggtccggcagcctgacccgtccaccgggaagatgaaggtcgcaaacaagcagagcagccgccttgtctgggagacgtgcctgagcgagctcaagtccctcgggaaggtggctgtacggctcatcttcctccatgccactgctagggggttcaggtgctcaccctccatgctgcgttggctctctgctcctggcagtttagccggtggcattgatcgtgcgcaccggctagtgttcgttgctgcaaattccaagctagagaggagggatttctcaagtgatgaagacaaggatgctgagttactcactgaaggggacgatgatgtgctaaacgagcctggcagtttggagcgctcctcagtgtaacacccttatttaattgttcgtttctttttctctattagccttttttagaagttaatccctaggaatttgctagaatttccaccccctacctatttttttgcctcctagaaatttcttcctcgtgcccatgctgttaattcttacttcctcactctagattttggtggggtggggagtggggcatgagatggagatatgcatcctttgttcatcaagtttggttaagaatgactgtctcttgccatatatgattccatggggccattgaacttgcagagattaatggaagtctttctgtcaatatgttcatagtcggtggtacaccgaaagcgggaagaatgtgtaaccatttttttttgtgaaaattaataatattgatatgcaattgaatgcaatctgactgccgtctatatatctattattgctttcttcaaattgcactgttacttcttttacattgttcttgaacgtgtggtgctctgttcctagttaatactaccatacatcactccactcaacagtccacactgagcaggcttcgaacaaagagtaataacatccctttattgttttgaccgtgattaactcaacaccaggaactcttgctactctgaaagagaaatgctcaccggatgctaattaataatatccttgtgtggtttcttctaacgcgcctggccttgtttctggaggcattgtgcatcattggagcttggcagcttctgtgatcctgtcatgactcatgaaggcgaggctcactttgcaacagcatcagccaagaaggtacatatctcatcttctaggatgttctttcggttctactccatggcatttggcttttcagctggacctgctatgctggaagtttaaacagtagcagcagcagaagcagctccagctcggtttattacgaggtgagcggtgccaactttcacattttgccttttctcagtgttactcgtagcatttactgtttttctccagagtaggcacaacggcaatgccgcaatgggtttttctgcattgtgtgatcatgtgagattatcatgagcacggtcgttgtcgtcgtcgtcatcttcttcttcgtgctccttgccttggtcgtcgcccaaccgggcgatgattgcgccggttcgcatggcttcatctcgacggtatcggaaaggctccggtccggagagggatgaaaagccggagttgaaggtgcagacacggtaggctttttgctcctcccccatccccatgcccatcaccacggccagggcctttgacaatcatgccttgcatcaaaacatgtccttttagtttgcagggggtacaagcttgccaaggcagtgatcgattccctttcctatcattgggatgggcacctcggttgctgcctaccggagagctcgccgtgctttcgatccaatctgccatgagagctcctctccttgcccttctggtcttatggtttgatggagaaaagagcgtttgattggagcggcagggatgtgttcttggacaggagaagaggaaagaaaagcctgtgtaatacaggctgttcctgcatccgtaccaattggggtttttcttttttcgctcggcttctctgttgctcctggctcctgctgctctctcctcccctcagctgtccaagcacatgctttacctgactaatcattaccatttgagctttattaggcgtcgtcgcagagaacggaggagatgattattggacataatgcagtcagtattcagcaagtgatggtgagtatcgttggtgctggcacatctccttgtttttccttaattttcctcctgtgtcagtactgctggggctgtgtagttgttgctaaagtagtagtagcagcagcagcagtacaaactattgctggaatgggtgtattctgctttttctcagtcgcttttgcaacttgatgtactatgttttgtacacatgttgtgtagtagttgggaatatgatgctgtgaggggtgttaagacacggcctggagacaaagctttgttgttgttgttctctttgggtcctacttagggctcccttttcccctcgtcttagactaataatccagcactctccaatcaagctcttttatgcttttttctctctggtcaatagaaaaatggatgggaaagggaggccaagtatttggatcctactagcttgttgcaagtataaacaaggcaagtgtacaatccttgtccaacaacgattgagacccacatcgccacatgggaaagcaagagaggcccttaaaggatcaaaacaagaaaaattagcgcctcctgtttcctgttgttttaaaggatgatagcaacaaaagaaagccaagtccatacaagggcaagaaagaaggggtctttgtaatgatgatgattatgatacacacacatgttgatcctggctaatcgatcgaatggaataagttgcttggacgtggatggtgccatgtatgcattgtaatgtaaagcagagcagctctctttttgttgttgttgatgcaacaagtactcccctcagggtgggggggttgtatttgctaagaaagggggaaacacctgaggggatgcctttctttgtcttgaggctgagtgttttctcctctctctctctctctcacagtgttttgaggtgtgcgtgtgcggagaccccacagtgagagagagcagtgcgtgtcaacctcagtcctctcaccttggctcagcattcagcaaagggaccgaactctcttagggcagtctcaacccatattgtttataagtagtgtctgtaatactatgtcaataagacatcataatagaaactacagtctaccatccatggtttcttaaagtgggccattaataaatacatcatttctcttttctaccaatcatatttattcttcatctattatgaagaaattattctcttctaatgcaaaacttgatagtgtctagtgcataggttctcgtattgaagctgtgtcttgcatgagacccagtttcttcctctcttcactctctctcttaattaatatagtgccacataagctaaaagtcctacatggcaatatagttaatgctatagacaccatcctagatggagggttgggactgcccttaggttcagtctgtgcgatggatggatggatagatggatagattcattgatagcttgtctgctggacattacctcttctatcttcccttgccttgcaacacaacgcatgtcttggacgagacgacggccttcctttctcaatcaccatcttctttttgtgggataaaatgactaagaaaaacacgcgcgttgcgcgtcgacgacggtggtgccgtggcggtggcggtgcgcgacagcaggcaatcgacgtcggtgcgatcgtacgtcggcggtggagccgagggcgccatggatgccggggcgagatgctctggacatacgctagagtacaacgggattaggcttgtgagctatgctagtgtggtagtttaatgggtacttgtcgacgtagactactagtacacctatttcttaattgggtacttggcgacgtagctagggagtagagatagctgcgagcaacttgctcacaataatagaggtggttatctacagttgacagcaagtgttatgtgctttatctttacagataatcaataattctcctatggagtttggatacatatatgacgaacggcatgctgcaccacagaggtgtcaattttctgaattgaacaaaagttattgccatcttccatttcaagtttttattgtcatcccgtaatgtatatataggctgcattttcaattgtttttactgcaaatatgattagtatggagttctcaacctctgcattgcacaaactattattataaattttgtaaatgttaaaatatggcagtcactttgaacacccgcgtagattgcatccttatatttttttttcatataatagcatatatatttacatattttatcattaaaatattttaaattatgtactaacttaaccgaactaaccaatgtgtaatattcatattgtattttatatatgtgatagttaaaattatattactactagaaaaagtgcccgtgcgttgcaacgggaaaaaatacgagaaaattgaggaaacattgagaaatatttacaatctgtaattaattgaaatacaaatttcaccttctttatataaagctacatgtgaaatcgtaattgcacatttatacgatgttcttttaccaaataatcggacttttttttctgtctttctgacagctttttcctagcatgtttttcttttcttttttttaccgacaacgaaaactgatttttcctcgcgcttttctgccccttttttctgacttttttctcacgggttatttttgcttgtttttctcgagcgttttttttcctcgtgagttttcttgaaaccgtttttttctcgcacatttttttatattttaatgaacaatggaaacttctctttttatgttagtaattagatagcttagacatagagaatatatgcactgacaatgtttttttttacagacggcggaatcataattttctcgcgtgttttttaacatttttttctcacatttttttgctttattttttctagctggttttctttttctcgcatgtttttttcttttcttagtggacgatggaaacttattttttagatagatatattagattagattagatataaagaggctttttttgccgcgttttttctccccttttaccatataatggttttttttgttatatacggacgacgggaacttttttaactttttaagtagctatagatatagatagagatagagatgaaatcttttttccttttgtgattaggaatttagattatttatttatttattaggaattaaaaaaacagaacggcagacgagaggggaatttttttttccacctccgattcgctcttttttttcgttgccgcttttttttgcttgatagctcttttttttaaagataagacggacgacggaagcattataaattttttaagttatatatatatatatatatatatatatatatatatatatatatatatatatatatatatatatatatatatatatatatatatatatatatatatataggttttatttgttatatacggacgactttttaagtagctatatagatatagatagagatagagatgaaatcttttttccttttgtgattaggaatttagatttttttatttattttttaggaattaaaaaaaacagaacggcagacgtgaggggagtttttttttttccgcctccgattcgctctttttttttcgttgccgcttttttttttgcatgatcgctctttttttttaagataagacggacgatggaagcattataaattttttaagtagtatataacagatatgaactgtagattggtcttccaatattttttattttttaattctgaattttcgttattttcaaattttattcctatatgaacttgaaacccttcttttaatatttcctatttttaaatttctaatttctgttatttataaattatatttttatatgaactctagactattattctaatatgtcttatttttaaattctaaatttaaataaggaatatgcttgctaacacacgttcaaagaaaaacccagtgggaatttcgtgactttactaaattcataagttaatgttgatgatgcaagtgtgtattcctaatattgataggcatcatgattttaatcggtggatagagtcatacacttacgataccaccactacatcttttacctagtaacttaaattgcacccggatatactattactgtatagacaactatatctcatctgccttctttattctgaaaaaaaaagggagcgctgacataagaatatacgtggatgaatccgaaaccatggttttttttgtcactgtagttatttttttaacagaaatggaatatactccatacttggatctatcttttgtctgtcttcatatattcacttgagacaacataaggaaaaacaggcacaacgttcaactgacattgatatttatattttgtaagacgcagaagcaggtatctcaaccatcatctgtcccttttggctcttggtggcctccaaaagcacctggtgaatgattcaaatttattagcacctcgcaactaaaatacaggcatgaggaggagtattactctaaccaatatcataatcaagttcaactgcgatttgcacgcattcatctagagtggttctcgacgcgcatgatgatctgcagatgtagtaatcaaagatctcattgatttgagcgctagcttacttaggagtatctctggcgcatcagcccgggtcagtaaactaatccttcctgcttactattacttgagaggattattaaactgagccattgggaaagcatacatggcctcatggccttttctgcaacgagggaagttgatcagagtgacagagtcaagggccacaataatctattcggtgaaaagcctgaggtgaagagcatatttgtagagaaagggaaagggagagacattggctactgctctgcctttgagatttgagatttcatcattgcttcatcttagtttaatctcctggtgggaaagggggcgcattccataagaggcattgccaataccatattcacaacctcatttgaatgaatgcctcttttatcccatcatttccccatcctagcaaaggtagtcggtcagtcaaagaaaagaaaaagaaaagaaaacaaacaaagaaaaaaaagataataagtgttggctggctgtgagcattcaaaccctaatcaagagggccagtagtagtaatcagtaatcgccttttattcctcggtcaaaagtgcagatttggagctgggcggtgggcccccgctgtcgggagcgggcagagggattagaaaagatgacagaacagcatgcaaggcatctgaatcttgattagttaatgtaatcacatccgtatccttagtccgcgatcagcatggctgagctgagctgtagtagtgttcgcctctgcagcaggagacgattaagaatcaaaatcgactctttcaaaatcatatttttctcgagcaatacgatcctttctactcttatttgatcgaatatttcatatctatttatactaccattccgttatattccgttacagtggtagtagaaatgttgacatatattattgtaaaaaaataagtatgaatggggtataatcattgttgagtaataactaaacttttttttagattttttcatgtgtaatatgagcgatgcaagcgcaatgaataatcatatatcaatttaacgagaaagaaaaaaataagtgaccgttacttgtaatcatcgtattagtttattttgagaacaccgtggcatcgctcttttccctcctttgttctttcctagaaaaagagcacgcgcgtatacggtgggcggaggatcctccccagcagtagctggggtgcagaattggacagtgcctcctcgcctatggatcaaacatcaggtttgtggacagtactccgtgtggactctttttctttatgtgagactcacggcctgttcattttaaagctattttcaaccatatcatttttttaaagtaaagttgtcaaaaaaaatatctacttttagtttgttatcaaatttggtcaatatataaaaaatcctaccaaaattttagcaatattatcatcttgccaaaattttggcattagcaaaacttggcaatgtttattttggctacaatctgaacaggccctcaaatgtgtacctgtactatattactaagtgtacacaattggagcattctccctccatctcgtaaaaataatataaaaggcaaattttgctacagtacatcacgaccttgggaaaacatactttcaaaacttgaatatttactgtggacatcacacctattaaaataatatttttcggttgaggaagagagagaaatcacgtgaaagtactgaaatgcccttgggcccacatgtcagatccctcctccttgattccgagatcacgcgacaagttcgaccaccacggagatggatttctctggcggcggcggtgcaatgttaccggagatgtactagagcacgcggcggctgctgctggtccgccggtgccgtccggatgcaagatccaccgtcgtcgctagacccggcatggcagaggcctttcgagcccacctcatcgcggatggcattggcgatgggcggatagttggcgtccacgtgctcccgttcaacccgtggagtatggcttcccaaccagcgtcgagctccgtcgtgctcacctgcgctcggaggcggaggggtgcggtgctgggcacgctaccaacggcagagcaccactatggatgcggccaatgtaggccgcgcatgcttcgggaaacatgcttacagaaaataaggaagttacggtttagaggtgaaagaaactcagctatagtttagaatgcgcaagattcgcttttgaaaaaaaaataatagtatgataaacttattactcctttccataatataaaagattattttttttgaaaaaaaggaagtagcaacttggtcccataatataagtgtttatgtatttcttttattacaaattaagaaagtagtaaaaggacaagtcatgatacaaaatgtcatagttagaggaatagggcctgatcagatttgtgctattttaaataatacaatttttggtaaaattgacaaatgagtggatgcatttagtttgttacattcctagagaattttggcaacaacagtttagcctatcctatcaaaacttgaaaatgttactaatttatctaaattttgggactattctaaacatgcctataaacttgcgttctctgctccaaaatgttactcctttagtaaagctatatttgggaatggatcggaaagagtacaaagttagtatatgaggaataagctaatactacttccgtttaatattataagtcgctttgactttttttagtcaaaattttctatgtttgatcaaattcagagaaaaaattagccacatctaaaacaccaaattagtttcattcaatctaacattgaatatattttaataatatgtttattttgtattgaaaatgctattgtacttttatgtgaagtttgtcaaatttaaaaatttttaactagaaaaaattcaaagtgacttatagcataaaacatagtagctacagaacaaagtactacctctagattataaaataaatcccctatatttcaggacaaggtacaaagcaaaagctcttacgatgagacggatgagagaatatattttgtgaacataaaacaaagttaaaagtacggtagcgctaatccacgcgctgcgcgcgaaatatttgtttgagtgccgcacgctgtctccttccggttttcccttttttaccgccccctttcctccgcattccacctttccttagtttgtttttttattttttagtaccccaccttccgtgtttcttttctcttttccatcttatgcgtgcttcatcaaagggctcggtaaaatgttaaccatccagatttttccttttttcgttctttctctccagtttttctattttcgcgttttagtaaaatatttaccgtctagtttttctttccaagttttctgtttttccagtgtctccctacgcttcaaaactaatgaatttactctatggacttttccatttacttccaacctcccacatttgctcattcaaaagtaacaaatttactcgcatgaatgcccccttaaaagtaacaaatttacttgtatgaatgccctcacatcgtacgacaccattcctagatggtcgtaaaagaattactaccagcctacaacactagtaattgttttaccattataaatattgtttagattccgtggtctgcgagtaaaacaattaccaccttcttctcaatatagcccatgatctcgtagccataatatgtttactgatgcattcaatacacagtataagagtaaaaactgagacttcatggtatgcgagtaaaacaattaccacattcctctcgatatagcctatgatctcgtaacaaccatgtagaatatgtttacgactgatgtattcaatacacagtataagagtaaaaactgatactaagagtattgttaatctgtatcaaaaaatggccgtacgactgaaaaaattacaggctcaatcacatacaagtgataaaaattactcacatgttaatcaaagtagaaaagaaaaaaaagattcaaccaaaaatccattgtgaaactaggatcctggtggctttgctggatcttgctataaggatggagaggctggtctgtgtcttgtgacaggtagtggagagggcaaccgggtggcgagcagtagtcgacgatggaatcatagaagggtgtagcagcgtggtatagagttgggctcgacgttgcgcagtagcaaccatccatcatctagcaagcacgaaaaaaatgcaaaaacattctcgttcatgtcatagagacgacaagcaaaagaaaaatagcaaacaaccttcatcaccagcggactccaccttatcctctgcggccagccacatgaagcacgatgtgcaaatgtaggacctatgcagcccatcaattcagatcaaacaatattggagagtgcacgttaatttgatttgcaaaaagaaattggggcttcatgtgtgaaggcaaaagagagtatgcatatgcaaatcggagtgtcattaccttacttgcttgttcttcgaagtggagaaaccgccggttgttgctcttggcctaggtgaacatctccttgctggtaaaggtactacctgacgtccgacaactaggcctgaagcagtgccttcgcctcaactgccaccagccaccgctcgccggccaccgccgtcaaccaccacgatgtcgtcctcctcctccatggcgtgtcaccgatctatgggctgggatggtggattgattcagatccgaaaaaagaggaaaaaatgaagtgagggtgagagtggttggttgggtacgaggaaaatagaatatatactggaatctgggtatttttttatcgaagtaaatcgtttactccgataatagctggatggcgtgacgtggggtgggatcggaagtagggaagttgtttttattatcgaagtaaattgtttactccgataacaatgggagcgggatgacgggacgtagggcgaggtgggcctagactaatacatgtttggcgctcagaatactaaggagcgcactgtgctactaatagttatactatatgaaagtattacaaggtagtattttaaagagtgaagtgcacagtggtccaatctgcaagtcctaataactaaatgcgaaaccatggtcaaaatatctaacctaatgtgcaatccactctattttaaatctcatcataaccgttagtccctgtttagtttgcgaaaagaaaatttttgggtgtcacatcggatgtttgaccagatgtcggaagcggttttcggacacgaatgaaaaaactaatttcataacacgcctgaaaaccgcgagacaaatcttttgagcctaattaagctatcattagcacaggtgggttactgtagcacttatggctaatcatggactaatcaggctcaaaagattcgtctcgcgatttccatgtaaactgtgaaattagtttttgtttttatctatatttaatgctccatacatgtgtcaaagattcgatgtgatctttttggaaaggacgtgactatactactctaccactccatctataagagaccctatccacctatacttcaaataaaattttctttaaactactcatccgatttacgatccgattacaccgttgtattcgtaacaattaaatctttataacatgatctcacataattatattttgatgaaaaattataaattacttttataatatatctaaattacttttagatttcactaaattacttcttagacatataaaagtaaattcaataaagcctaaaggtaatttacatatattatagaagtaacttataacaaaaaaagaaaataactttaatgcatgcctttttttattggatgtgactacacagctagtcgtagctggtttatacttcatctagtataccctttcaacttgaaaaatgcaatagtatccatctttttgtaatctctttaataacttaaatcttttaaatcacatactgtttttaagatctacttgcataattgtactccactcaaaatatgtgacaaaatgagattcgtattgaatatgttcaaacattttattaatttaaaagtaatttattacatgttagaaagtaacttccatgttatcagaaagtaactattacatcttatacatggttaattctcattagttatttcatcaatgttatttacaatccatcaaaggttttatcttcttttctcattctacatgaaaaacaaaaatgaatggaaaaaatagatttatagagagttacttctaaaccatgcaaaagttacttccaattaacattgaagttacttttaaaaatttttaaacttacatgtgttgatctgtactgattaaataaagttttctagataaattcgtatttttatccttacaatgattttacttctaatatcgtgacaaagttacttacgttttgttttaagttatttttataatatatataaattactttccaactttattgaatttacttttatatgtctaagaagtaatttagtcaaatctaaaagtaacttatatatatacgataaaagtaacttacgtatataataaaagtaatttacaaatataaatattttttcatcgtaatataatcatgtaagttcttcttgtgaagatttagttgtaacgaacacaatggtgtaatcggattgtagatcggataagtaatttgagagaaaacttcatttgaagaggaaaaagatgtagatgtctattaaaaaaaaggcatgcatgtagtagactttctcttttttttttcctccactgctccttcggtctttcctgctacatggttgtgttagcctgcctgcagccaagtactagtggagaaagcaataacatcagccggagatgaatagataacgggatcagatggtcggaggtgcgtcgcgcgattagactaaccaagagcgtgcactgtttagattttacgttttggaagctaaaccgggccttaatacacaagagaaacttgccagaactgaattgtttcatgcgaaatcttggcaatccaaattaaagacgaatgagacaagaagtttgaatattatcatgggcaggagcgtccaaatgtgaatttagtgtattcagttgttatagacacagtaccatttcattttgctttccctttggaaatactccagacagtatcatttgaaaaccatgtagacatcccgtggctatgatttagtggcagcctgtgctactagtacttaatttctaaagcgttacaggcttacagctcatgctcctccgtatgaagtaccacgaccttgctgcacgccagttcagagctgcacggacatgtcagataaaacttcacagtgctgattattaccactgacctcgagatgggtatttacaggatagttaggcgaaatcagagagctgtgtgcaggttttgaacgacaaaggaagtttaatagtataggctactactagctcaaattcatctatagccaatctaagagcaggtaaaatagcaggctattagccagctgtaaacatattttaataagataaaatgtgagagagaagagcagcgggctacagatctgtagccagctgcagcacgaactctaagacgcaatgtgtgtataactggtgtgaccatatattaatagtatagtaagcaactatcgtatgaattggctattagattggctatatatcaattgaagctagtagtgggctgtactattaaacttgctctaatagccaattcatacaatagttgtttactatactattaatatatggtcccacctgtcatatacacattgcgtcttagaatccgtgcagcagctggttacagatccgtagcccgctattcttctctcttatctattatctcattaaaatatgtttacttgtacctgctctagggcggtgagccggtcagaccgtgagagcaagacgcggcagagccagcctgcagaatcatacaatggatgccgtggggtggaccgagaagctcaaggattgtaggatgggggtaattgtcgtacattttgaccagctaaagaagttgtagtgcggatattgtagctaaaataaattttattaaaatttgacaatgtcaaaattttagcaagttgacagggttatgtatttaccaaagtttagcaataaacaaaacgtatatatgtttttaacaactatgctaaaaaatgatacggttgaaaatagcatcaatctaaatagcccctacatttttagaaccaacagcgaggttgcaacctgcaaaatatacggcatataattataccaaatttgttgttaaaatcaatcttattaaaatttagtagtttgatatagtttagcattattaaagttttatagcgttggatacgttcggtagtttgtagccccatcaaattctgatagtgtttttatgagagacaacttacgaaaatgccaaattgtggtagaatggcattggcatgaattaatatgttagttagttattagtctaccaactagcgtcaaaatttggtagcgttaaaaactggtcctaaaaaactgaacataacctgtgaacctttcatactataaattaaaaaataataatttttatatcaattacaatgagctagtacatcacaaagcacataatttcaatataattatagggcccgatctgaccaaatttgtaaaccaatcccatttctcggtaagaactaattgacgcgtaaagaaattaattctagacacgtgaagaggaaaacatagagtgagatctcttacttattttcctccaaaattcctctagaatggttctgttgatgccttttcgggtcacgctgctaacatgatcagaatctagctaaagccttgcgttgttatggagtcgtcaaccagctcgaccttaagaaactcctgatcaatatggatttagaaaatcaaatcggatagtgaagactatttagataaattgagataaacacccgtctcgtgagcgaaacataaggtttttagtacaaacctacaaaaaggattagcactctcgcagaaaggaatgacaacttttagtgcaaatcgatgaagattgatgaactaggctaaaaactacgcaaaaagtagacacgatatcgacaaaacgattcaattgactagttgcgttgatcgtagaattgttgtttcaattaaaccagctatgtcccttataaaggggtttctcttgcctccacatgactctctccatgtcctactaggcttaaaaaccatttaggactcaataaacatcaagcccaagcaaggaaacccaataaacaataaatttgacttggagttagacttcgtcggtccaaccggcctctgttgaagcgaaaaacacacattggccaggaagatttgcttaactcctgtgcaggtccaaaatcttgcttttaggttcgtgagcatgccagttgatttgatcctgcaatcaacaagaataaaagacaagaaacgaggttaaatccataaacgatagccgatcggctatgagtcgatgacatatcatcaattgtcaagccgatgttattagcattagatcggcaacgattaataaagtaatataaaactaaatctactcgatcggctgtagatatcaacgatatataatctttctctcaatatatatttaaactaagtgattgggatagatcgaacgccatgtcgagacaatataaatcacttaagcctaaagatatattaagatcatgattatatgaatgtttatagcataaccgatcagatagatctagcatgtatgggctaataccccgatactactctatattaagatgtcaagacaagaaaaatatatcaaacaaaaagcctaatatattttaatgcaataaaatcttaatataaagggcagatttagcataacaatcaagcatagaggataaaaatagctaaatcaggtaagatcggctgaaactccgatgctatctctattgatgatcataaaacaggctagatatcataattatagatagaacttaatagatcgaactcaaccgatgcactattaagcataaagataactgtaagatctaaacaagataatgaaaacctctaagatatggtagatacacgatataatctaaattaataacgtgatctaactctatcggctactttctaacagtgaaaaccagccgactacaagttatatagcgcaactaatgaagattataaagtatatatgataactcgacgaattacataaacgagattagagtgacgtaaagatggaatcactaatcctgagaactcaagccgccatgacaagtttacctttagttgaagatcgaaaccgatgtagctcaacccgaaagcaagaactcgtcgaaaacgaaagtaaaagggtggtgatgcaccgaaagtgttattgaactgtgtgttattgtttacatttggttcgggtcatatttatacccgagatacatgatatgtccttgccggacacgactcttatctctaacaaactctaagatacatataagtctttacggcagacttttgcccaaacatatctctaaggaaactattcaaaatattctaattaatagatataattgcctagctgagagcttatccctgtcgtggcaatccttgtgaagcacgttgatcaattctagaagcagttttacaactatctcatcagaatcagctgtatcggctgtcctttgttctatccatctcagccaatgcagaccccagccgatgccttcgccaccgatgcatactctgttcttcatatctaactctttgctgaattcgctttgattccaatgccgaatctcgttcatatcttaccaaatttggtcgttaacacatgccccccaagtccgctatattggtaatgttgcggatttgctcaatttccttctccgagtaaaactagggtttcctaccccgattttgttttggccattaccgcgctttcttttaaatagtaaccaccgctttgctcgtttcatggcgtcgtgttcgttttaaccgctctagccgaaaactttccccaatctcctcctcgagctctccggcgatctcctcgagctttctggcgatctcgaaagcgaatccctgcagcgccaactttcgttgccgacaatgtcgacctccgctagcccttcgagcacaccaaccgccgattatgctgaggtaagtaccatcgggtaaatccctttttttttgtacaagatcggttcttcctttgctcaaccttcgattttcttcttctattgcatctttctcatcaagttgcagttcctagcataaccgatgagtatcagtatttcctaggcccaatcggtaatttagaccccacagagtttatcaatggatcccctttagatttgccaaccccaacttaggcctctggaaaaatactttcaaatcttggccatcagccgaaaagagttggccggcctggtatatgagggtatcagctagaaaactaatccactgggaagaaatcggcatgtcccaagctttagcgttgactgcagcagatatggctaaggatgaacccacgatgacagctgcaacttatttctagtccactgctatgaatgcctttcttttctcccaaggaccgatgaccccaactctcttggatgtcacaatgataactagcctagacataacctcatcggctaacccagttagtttgaataccaaacccacctttgagttcaaaactaggagcataggtggttggtcaggttttgtttcaaaaaacatgggtactgggccagtttctacaagagaacatgcagctttcctcatgatgtggcttgagaaatttctgttttgtggcccaagctgtggtcctgctgccaactggcaacacatagcagaaaacctggtggagaaaaagcaattccctcttggaaagtatctcttaggctatttgtactagactctgaatactgcaataaccaaaatagcctctggactatcaatcggcataggaggcccttggtggctccttaagatctggctgaacttgcacaccagaaaagttgttaatcggccacccctatcagatgcaaaatttccaagattcgagccaatcattggttatgatgaagaagaaatcaccacatgccgatgcatgtcttttggagaagcagcatccaccaacaccgcatccaagctgtcggctgaacctttcatagaatggttcaataatttctatgatgatttcccaaggaatacctgaatctggtttgcatatgagggatttggtacttttgaattgccaggcgattttcggtttgatgagattaattccgaaaaatatgacaagtctagagaagtgttttcaactgccatcagcccttgtatactccttgtcggcatccatcaaggcaaaaacatccagatatcttatgagttttatcatccaacaagtgctgcaaggcaactagggatgggccaactgccgatcagcctattctttgctgacaagatccaaagcaggggagaaatcacatcagcactcatgatggatcggctgctaacataccaggaccacctctaggcagtattgataacatcaagctaaggatgttgtgaagtgctgcatttgactgatggtggatagtggaagaaacatttgtttcaccaattggcttcaacatacttgacagatctattccctgaagctgtccctcaagtaagaattctactctttgtcaattctatcaattgtaagccgatgcatcaatcttaatttttaaatttttcccttctatagacaaccgagtcttctccccctcaccatagtgaaagtggcgtggagatccaatatgctctaggactccttcccagtggtggtggtctgacccgtccaatcatcggctatcatgcccccaggacctcaacgctgctgcatggtctgccttgtgtgccgatagcccctaatgttggcaagaagaaaagagcaaaatcggctgctgctccatcggctgcaaaaaataaacccaagaaacaaaagactactgctgatgatctgccaaccatagatccagacgtagaagaatttctggagggtgaagaattggtagaagatgtggatgaatcggctgaacatgtcagtgaagcaagggagcaaacacctccagccgatcctcttgttcctcaaaaactccatcacctatagtatgtcctacgtacaaaccgagggtatgtgtttgtttttggtctatggcctaagtttatttttcatttataccaattcttaactttgattccttgcagaaaaagtttgcttccaagaagccagaggcgtcgattccatcggttaagtctctaagtcccatcaaatttcttttcagtttttaaataaccgatactaatccatacttatgttttcagccccctcgtcccccaactctaatttctgaatccagtgagcacactccatcggctgcaggtagccatcatatagatgaaggggaagaagtagcaccagctctagctatccctgtaagtgcctatcttaaatctgcaaatcatatcggctgccatatcacctcttactaatttataatctcaatatgtccttttttcaggttttggccaatatgttttctttcgacatcaggcagttcatggatgaagaagaagataccacaagcaaggccttggagcccctagccgatgacactaagtctactttgctagatatttcaaaacggcttgagggttctctagaaactctagttactagttgtggatctatccgagatagatttcatgagatccatgacaagattccagatgagttagccgatgcaatcactctggtagcatacctcgagcaacatcggctcaagcttgaaaaggccaagcaaagaattagcgatcgtcgtgagagacaagatcttgaagcaactgtccaagctaacagggcttcaatcaatgaagaaaaagccaaacatgatgaactggaagctggtccggactccactcaagccaatatcaatcggctgaatgcctgaaggatagaacttctagccgagctagaacaatgtagtgcacagattgccatcgaggtacaaaagcttgccgatttgcccaaaaccatcgaagaccaacgatcaaagctgaaagtatccgtcaagcacttagctgaattgacgaaatccttgaacgtgattcctggctctgatgcaaccgacgcccaaatcatagatgaagcagatcaaatcaggcagagagctatatcggccatccaaaaatatgtgtccggatgagctaaagttgtaagtttaactttcaactcgcaaacttttgggatgtaatatatatataacttttaactatctgcttgtgaagcttacttttgaattttgcttttgaaatcaagacttttcatatatatatatttgcccccctaattttgcaatgctgagtacattgacaaaattataacttggactaagggcggtataccaaatgtcagccatcatatatcggtaaagcacaaccgattatgataaaaaaaaatgctaagggtgatataactcatattggccatcatacatcggtaaagcacaaccgattatgataataaaaatactaagagtgatataactcatatcggccatctgaaggcaatgtcaatacatcatctaacatgtatcggcaacgctcagccgatcatgaattgatccaaacacttgggtaatatttcttcaagtattttccattaagtgctcgtccgaaaacttcaccatcaagtccttgcaacatataagcccctttggatacaaccttgtatatttgaacggtccttcccaatttggtgaccacttgccgaatttattatctcgagttcctatcggcaagatcaatttccaaactagctctcctttcagaaaaggacttgggcactacctttttgttataatgacgagcaacatgttccttatccctagccactttctccaaagcacgcaatctggattgaaccaaatcttctgtttcatctaccataatattgtaatactcatcggctgttaatttatcttgtaaatctattttccttgagccgattgtagttttccatggcagaactgcctcaggcccataaacaagcttgtaaggaggaacttgaatcgatccatgacaggccatccgataagaccataatgcttcgtccaatcttgtatgccattgccgaggaaaatcagaaatctttctcttgatcaatttaattaagctcttgttagatgcctcggcttgcccattagcttgcgcgtaatatggtgaagaattcaacaatttgatacccatgctataggcaaactggacaaattcatcagatacaaaaattgatccctgatcggttgtgatagtctgaggaatcccaaatcgatagatgatatattcctttacgaactgtattgcatccccagaatcaacttttttcaatggaactgcctccacccacttggtaaaataatcggtttccactaatataaacttatgtcccttgcttgaaggtggattaatctgaccaatcatatcaattccccatcctctgaatggccatggcttgatgataggattcatagccgatgctggtgctctctgaattgctctaaatttctgacaatcttgacatattttgcagtatcggaagcaatcctttaacattgtcggccaaaaataccctgtgcgccgaagcaaccactttatcttgtgagccgattgatgaatacctcaaataccttcatgtacttcacccatcacaaccttagcttgatcggcactcaaacacttaagcaatacaccatcaatcgtacgataatatagctcatcatccaataaggtatatcttaaagccttatagcgcaattttcgtgaagccgattgagacggattttgtaaatactgataaacatcatacctccaatcatcagctgcaattgtagcgacctctacttcaatatccttcctcatcggcttatatcctgatgtcccttgagccaaatcgttagcctcaacgttctactcccgagagacatgtttcaaaatcaccaaccaaaaattattcatcaattcctggcacttttcgttgtagatcatcaacgcatcattcttgcatccatattctcctgccagctgactgataaccaacaaagatccccccatgatctccacagcatcggcttcaacctccttgagcaactgcaaccccttgaaaaccgcttcatactcagcctgattgctagttgcataggttttgatagtataagcaaattcaaaacttgccccccaaggtgaaattatgaccaagctgataccacaaccatgagtgcaaaccgacccatcaaagaataaggtccaaggcccgatctcaaccgagccaattgaatcatcacgatgctccacaataaaatcggctatagcttgccccttgactaccttgggtgattcatagcgaagatcaaactccgtcaaagcatatatccactttccaactctttcttttaaaaccggagccgatagcatgtatttgatcacatcggctttacatactatggtgcattcgttggataacaaataatgcctcaactttgtgcaagagaaatataaacacaagcacaacttctccaccggagaataccttgtttctgcatccaagagcctgcgacttcaatagaaaatagctctctccttgtcttctaactcctgaatcaaaactgagccgattgacttctcatcggctcataaatacaatttgaaagacactcccttttgtggaggaattaagactggaggggaacttaaatatgccttaatattgtccaaggccttctgctgctctgccccacaagtgaattcttgatcggctttcaatcttatcaaaaggtgtaaaaggttccaatctcccagataaattagaaataaaccttctaacaaaatttaccttgcggatcaacgactgtagctgtgtcttgtcctccggaggttgaatcttcttggttgcattagtgctcctctgagttacctcaatccccctctcatgaacaagaaaacccaagaattgcccagccgatacaccaaaagcacaattcgtgggattcatcttcaagccatattttttgtttctctcaaaaattttcctcaaatcggctatgtggtcctccacttcttttgatttaacaaccacatcatcaatatagacttcaaccaacaagccgatcagatcatggaatatataattcatggcccactgatatataactccagcgcttttcaagccgaaagtcatcacaacccactcattcaagccgatcgcaccagggcacctgaaagcagtcttatgaatatcttcttctgccataaaaatctgattgtaaccagcattgccatccataaaacttataatactgtgctcggaagcagcatcaaccaattgatcagcaattagcattgggtattcatccttaggggtagctttgtttaagtctcgaaagtcaatgcacaccctgagcttgccgtttttcttgatgactggaactatgttggaaacccactcagcatatcggcatggctgaataaaaccaacatcgtatagtcgagtaatttcagccttgatagcgtcatacatatcggctttacatctccttggaggttgttgaagtggtttatatcctggcttaataggaagccatggttcaacaatcgatcggctgagtcctgacatctcataatattcccaagcaaagcaatctccatattttttcaatagctctattaacttggttctaaattctgcagatagattcttactgataaatgtcggccttggcctatcccttggacctatgtcaacttcttccagatcatcggccgacatgaaatcttgtcctaacttgccatcaagatcatctactgtgtccttggtgtagaaatttgaaccctccacaacgccctcaacgtaataatttgggctctccatcttcaattggttgtatatcacaatcggacacttttagaaaatctccttcccaaactaccagaaaggcaatcaattccatccatctcccaaagagctaaatcggcactagcaacattaactgccctgtcggctggcacgatttcaatcttgtcactttgccattgaatcaaacattggtgcatagttgaagaaatacaacaattcgcatgaatccaatcccttccaagcaacaggctataggaacccttcctatcgatgacaaagaacgtggtaggaatagttttgctgccgattatcaattccacattcaaaactcctttggtttccgatggattgccaccgaaatctttaagcaccatattggtcctgatgagatcatctgcattcttgcccagctttctgaacgtagtatacgacatctaattcacagcagccccaccatcaaccatcatcttggacatcggcttcccattgacaaactcattaacgtacaatggcttgagatgttgattttctgtcccctctggtttctcaaagattgcttgttcttgtgacaaaatcaacctagtagatgcttcctgtacatcatcaacatcggcttgtttgacttcaaattctacaggcagcataaaaaccatgtttaccgatgaagatgcaatagctttgcccttgagcaacctcttcaccttgtcggcttcaacctcatcggctgttgtaactttgctcttaacacgccactcttaccttgttttcttcagccaatggttgatctcttgttgtacctcctaaaaacgttccttgttcctcatcctctggacccttctcttctgattcttagtaaaaatgccagaaggacaccattgcgacttcctgccttcatcttcctcctgatgacgatcttggtgcactgggcccaacctctgataaacaggcaatctcttctaacctagccgatttcctctattgtaggattggattgaactccctgcattgtcactgcatccagggcaatcttcaatcgatggcagtctgatcccttcgttccagcaaaacctgaaaaactcacaatctcaatgcggatcgaaacctccatcattttcttcaaaatacttttcctgcttgttgtcatgccttctttgatacttgttaataatcctggctgaattcagctgtgaactctgatgttttccctcatcggctgtccttccatatgtatgcaccatgttaataggaaaaggatggccatcaaccttcatcggcttctttgagtcatcaaattttatttttcctccctcaatagccaattggatctgatgcctgaaagctttgcaatcattagtagcatgagacccgaagttatgccatttacaatatttccttttccctagctcctcagcctatggaattacatgaccgacaggaagttgaatttgtttctcccgaagcagcaaatcaaaaatcttgtcagctttggtgatgtcaaaatcatatgtttcctcttttccataattcttcacctactgacatgtgacaacctttttgctccttgctgactcggctgctgctacttcagaatcatcttaatcctcagagtcatacatataaggatacacatgattgaccttcttgaaactcttctttgcctctgcaaacctttgctcatgcagggttaccttctgtgcaaggtgagacaagctttcgaaatcttgagatgaaaacttctcctttattggagctatcaaaccctgaaaagtaagatcggccaactgagaatcggttaaggccaagttgtagcacctattcctcatatctttgaacctctgaatataatcttgtacaatttcatcatgcctctgtctaactgctgctaaatcagatagcttcatctcatgattaccactgtagaaataactatgaaactgtttctccagatcggcccaactatgaatagagttgtaaggcagtgaagaaaaccacatgaatgctgatccagacaaggacaaaggaaacaatctaaccctcaatgcatcaacagccgacgcctcaccacattaagccaaaaatcggctgacatgctcataagttgacacattgtcttgtcctgagaactttgaaaaatctgggaccttgtatcggcctgacagtggaactctctcaaagcactcagggtaggggtgccaatacaagtttccagtatccttcggcttaaaccctaattgctccttcatcacatctacaatcatgtcagcccagggcttctgctgaggcactccttgcatctactgttggattggatcaaactgattgtactgaggtagaagctgaggttgaggtgatccccctggctgatactgaacctgaggtgatactgaaagttcaagttaccaccaagatagttctaaggaggctgttgcacattatacacttgctgttcgggaataaattgagctccaacaggctgacgttgctgattaataggtgttctttgccaaactggtatcggctgaaccgtttgttacccaatcggctatactacttgctgcctgatcggtgttggctgaatcggctcaataaccggttgatgtggcccaaacattgctgcaatctgttcctgagtcagccaattaatgttttgcccagcatgccgaggttgttctctggtcaacaaataaagattaaccatctgcctttgtgccgatgatgatgcacctggtcctggagctgaagccgatgccgtcggatggcctggaggtacattagaagcatgctgctggttgccagtcaccaaattcctgtatggtgtgaatataccctctggcagaaagactggtcctttatcttgatgctcagcaattgtgccatcaaccacagatttgatcatgtttgtcaaagtgttgacaagaacccctgattggttgattagtgcttgatgaacagcatagtcaacccgatcctggaagttattgaactccaaggtcttttgttccttagtttcatcttccttaggcccttcacctttgtctcctgcatcacctccatcacctttatcacctttggctcctttggctttgccatccttagatgagcttgtttccggctcatcggtagaaactaccttcagtttgtacttctgaataactgctcttgagcaggtttggttgaatgaatctaggtacttgttcttcacattgctcatcacctgctcaagttcctgcctttgttccggtgtcagcttgtctagagtgactgggatgatgttcccagtgtcaacctcagacggttgaccgggtgcttgcttggttgacgggggttcggagccttgcttgccgtccgacatgatgaaaaaaccgttcaacgtgtgtcccaccgagcgtgccaaaagcgtattgaggcgaaaaacacacactgccctggaagatctgcttaactcctgtgcaagtccaaaatcttgcttttaggttcgtgagtgtgccagttgatttgatcctgcaatcaacaagaataaaagacaagaaatgaggttaaatccataaacgatagccgatcggctgtagatatcaacgatatataatctttctctcaatatatatttaaactaagtgattgggttagatcgaacgccatgtcgagacaatataaatcacttaagcctaaagatacattaagatcgtgattatatgaacgtttatagcatagccgattagatagatctagcatgtatcggctaataccctgatactactttatattaagatgtcaagacaagcaaaatatatcaaacagaaagcctaatatattttaatgcaataaaatcttaatataaagggaagatttagcataacaatcaagcatagaggataaaaatagctaaattaggtaagatcggctgaaacttcgatgctatctctattgatgatcatgaaacaggctagatatcataattatagatagaacttaatagatcgaacttaaccgatgcagcattaagcataaagatgactgtaagaactaaacaagataatgaaaacctctaagagatggtagatacacgatataatctaaattaataacgagatctaactctatcggctaatttctaacagtaaaaaccagccgtctacaagttatatagcgcaactaatgaagattataaagtatatatgataactcgacgaattacataaacgagattagagtgtcataaggatggaagcactaatcccgagaacgcaagccgccatgacaagtttacctctagttgaagatcgaaacggatgcagctcaactcgaaagcaagaactcgtcgaaaacgaaagtaaaagggtggcgatgcgccgaaagtgttattgaactgtgtgttattgtttacattcggttcgggtcatatttatacccgagatacatgatatgtccttgccggacacgactcttatttctaagaaactctaagatacacataagtctttacaacagacttttgcctaaacatatctctaaggaaactattccaaatatcctaacttatagatacaattgcctatctgagagcttatccccgtcgtgaaaatccttgtgaagtacgttgatcgattctagaagcagttttacaactgtgtcatcagaactggctgtatcgactgttctttgtctgattcatttcagccgatgcagaccccagccgatgccttcgcagccgatgcatactctgttcttcaaatctaactctttgtcgaatccgctttgattccaatgccgaatctggttcatatcttaccaaacttggtcgttaacagcctcgtatcattagtcgtaccagccctaagtcgctggttagaccggccccatctagtaggcgcggcgaaagtgcctctagccctctaaatgggttttggatgattaatgacaaaacagttaaaggactaatgagtttatgaagtttagtgcagataattagtccgaagatgattaagtgtgaatggagacctcctacgaaagaaatgcaaaattgtgcgagtactagaagcttcatttaacttgattttatattttgcttttgagtttatgaaaaccgtagtatcaaggggtaccaaattggttgcctttgccgacctaagtgctaaaataccacatctatagaagacaggcacatttgcacaacacttacatgggctctagtgtgagcaacaaggcctgcccaggacttcttagcattttggccagaacttccgagcgactaattttctgccatcgtctaattgttgacctgaagttcttggcaatcatgcatggaacttgtgggcacctttccacttcaaatatgaatattctacaccccaagctaatttggcaattccacttttgtttttctgagttccagcttcttctatgatttacttacctccttcaccttgttcttgagcttgtatggtgattgaagagtaaatcttgggggttgcttatgagatggctaggacttgagcacttagggatcgtcgttgggctgctgccggctgcttaccactcttggagggcgacctcctagatggttaggtgtcgcccgcaagcatccttatgttgtggattgtcccaggatggtttgtgggggtggatctcacctccgaaagaaaaagaggtaactttgagtggattcaagctggtggctaggaggttgcctttatagagcaagcttcacctctagtgtgatcttggtgtccaaattgggtttttctatggtcacttggaactgagagaaaccttggggtctaggcttgaagactgaaggcttcttcctgggtacttgcttggttaggcaaggggttaaacgagatccagctcacatgagctcttcaactagagtaggatcctagtgattcgaacttcgagaaaaaaaatccttgtctccccttgtttgttcacttgtgcttgtttttatgtattttgcttttgcttggtacctactatattgtattgagttttgaccattgtgtgaatcaatttactcattgtgaggtgattggaagagcaactcagagctgcccgaaagttcacgggaagatgttaggaagttccaggacttttgccaagaagttctggcctctggttttacccgttagaatttagtgcaaattttaggaacacctgttcgccccctctatgtgacatatgtaggctttcacgtgggttctttctaaatctagtcatattttccccttttttgccttaagtgccaaatttaggtgttaacaggttcatttcataggaatttgaaaggaatgggtaggaaacaatcttttttcaaaaatggatccgtataaatatttcgcataggataaaatcctctataattcctttgttgaaatggggtctacatgtatgcaacagttaaacgtacgagaggattttaagaatatgctttgcaaatcgaaggaattaatgatgcataatatatccataataaaacaattgcatatttgccatttgcatacgttccaattgttaatatgctaatatgtcaagaattgccatgacgccattatgttaattggagtttagttcataattaatttaatgtgccaccgatagtagggtttccttaacatagtagttttgatttgagagaaaattagataagtcgtacacattgaaaatgacaaaaggttgatggcaacgaaattgatggccaatacgacatttccttcgtgtgatggtccaacagaaactttgatgcatttgttcttcacatgtcccttcaataaaatatgttcggaacgtcttggaaataggtggaatactaatttggaaatttgtcagatgctagtgttggcaggcttcaatttagaaggaaaggttttcttgagatccttttttttttttgcatgttggcacatttggaagttgagaaatggaaaaattcctaggttgatgtaatagcttcaaacacttaataatattttgcatgataactttgatgacagttaagttcttgtaatatattcatcgtattggctctaagccatcctttcgctttgctttatttattctaagggcgataatttatattggtcctctcaaggccatgtcttaaacatcggctatcctttaattgattcatgagttgatccaaatgctaggatactatttcttcaaacatttttattgagtgcttttccaaatacttctccttcaaggctttctagcatatatgcattgcgtggtacacaacgatgtatctgataaggcccctcgcaattaagtgaccattttccaaacttactgtctcttgatcctatccgaaaaatcagtttccaaaccaaatctctttcttcaaaagatataggcactatctttttattataattccttgatactctctctttattttctataatattctcaagcatgtgtagcagatcccgagcaaagtcttctattcatcagtcataaaattataatactcatcggctatcaattgatcttgcaaagaaatccttcttgagccggtgttagtcaaccttagcaaaaaggcttcatgtccatatactaattgataagtcagcacctgagtagacccatgacacaccatccgataagcccataatgaaccatcaactaatatacaatggttttaaatgatgatgctctgattcttctagtttatcgaacacagcctgttgcggtggcaaaatcaactatgccaaagattcttcaagctcttcgtcatcaaacaatgatgctttgtcttccgcaggtcaaacaaaaaccatatttactgttgccgatgaacttacctcatcagcattagccttaaaacaacattttttttctcattttcggaggctcttcctcttcctcttattcctctgcttgctattgatgcctcaaccctcttggacaccattgaggattctgaattttatctcacttatttgatccatcttcttcttcaaaataatcttcatgaaatggcccaagacgttcatgtactagtactcatttcatcgaccaattttgatcacagtcacaaaaatactgtcgataagaatattcgtactcataatattttgatttcttgcaactgcacacaatgcaatcttcaactaacgacaatctcatccactgattccaacagaaatggaaaaactcacaatcccaatgtggattataccaagactcttcttcatcataagatcgctgtattttcttttccagtcgtccctggtatttcacaatcatgtctaatgaacatgattttaactcatgatgagcccgataatttgtcctttcgacttgattatctaattgtcccatataaaccatgttcaatgcgaatggatgtccatcgatcttcatcagcttcttcctatcatcaatgatcctcccttgatttatagtcgattgaatctattgccgaaaaattttgcattcatttgtatgataagaccggtaattacgccacttgcgatacttcctcttatttatttcatcaactggtggaataatatgatccggaggcagctgaatctatttttcttgcaggaataaatcaaattcactgtgggcttcttttatatatagaaatcatacctttcctctttcttagcatctttaatccgaggaaaagcaatcaccttcttatttattgaccactctgctgagctgattcggatctccttcatggtctgaatccgatgggtaatcattaacaggagcaattctcttggaaaatttctccttatttctttaaaccgttgctcatgagttgatattttttgaaccaactgagataaactttcaaaatcttgagatgaaaacctctctttaatcagccctaacaaaccttgaaaatccaattgagctaattgtgcatcacttagactcaagcagtaacatcggcttctaacattacgaaatctatgaatataattaggaataaattcatccgaccgctgtctgacagatgtttagttcataagcctcatctcttgaataccaacaaagaaatacatgtggaaatttgcttctctaaattggcccaacctctaatagaatttggtagcaaagatgaaaaccaagtaaagaccgattcaactagcgacagaggaaaaaacctaactttcaaagcttcttcatcttcagcctatgcttccccacattgagctaaaaattggttgacatgctcaactattgaaatattatcttactttgaaaacttggaaaaatctagaactctatatcattgaggcaatggaaccctatcaaaccattcaaggtatggacgtccacacatataagtccgctccttaggtttgagtccaaattgctacctcatgatttcaaacaattttattggtccactcctcatttcttgcattatctacattatattgatgtgggactgtcccatgtgcatattgattgctctgatactaatattggtgcccatcaccaggtcgatattgatgagatcctttcggccaatactgatgtggatcctcatgtttaatactaatggagttcttcttgtcaatactgctatggatgcccccatagtaagaaacattgtgagatcccaaaggaatttcattaaactgtcctttttcctggagaaaacacactaggaatttcacctttcgccaaactgtatgttccttgatcaacttatgttttgactggcttcaatggtgttgtccctactggaaaatatatacgccctcacgaaggttcctagtgaattgatccatcaattgctttcttgatcaacccatgtagtgtattcaccaaaaccccagattgatgatcgaagcatgatgaacggcctcattgaccgtctcttggaaagttctattgtgaggacttggaataattcctgaactaattcctgagccttggaagctaagtgttctgtattggtccttgctgagtcatgttaaaagattccaagcacactttcttaaaatcatgaattagttcatcttgattgacttcctaagacatgttgatgaagaaaatgtcccaccaggagggcaaaaagcgtattgacgcaaagtacgtcataacatacgaaggcctaagagatcttcatagctctagtgcatgtcctaaaatcgggttcatagggtgctagttagtttgatattgcaactatcaagatagaaaaattaaatcacaaagtcgatcagccaaagggccgatacaaaaccgtaggcctaaccgatgacgatggaatttcggatcaacagctatataaccgatataatttagatattgttgatgtgaaaacacggcggcctgggagatctgctttaactccagtgtaggtccaaggctagcctcgagtgtgtcaagagcgtaccagctgatttgatcctgcaatcagcaggaaagaataaaagtagaatcagtcgaccgatagccgatcggctgataggctgatagcgtatcgttgatggtctcagccgatatagttagaccaaattggctatggattggatatatcaaagaataataaaccctaaacacacccaatcggttgtaatattatctatagagtttaacagattgatttaagacagtactaggaaaatagccaatgtgacagtatttagagcaagagagataacgtaccagctaatactctagtacaaacttatctaggcagattgatccatataaacatgtaaaatagaaatcaagaatgaaggtatatgagtctagtcgatactgaataaacattgatatgcttatctaaaatgatctacatgaaacagggggtgaaacatgcatattaggtaagatcggctaaaaccccgatactatccttattatgcctaattgcaggctagattgcatgattctaagaacgactagggatgatgcatttcaaagtatgaaaagatgaaatatgtagtctggacaatcaagcaattagacactttttaggacggtagatgccttagctaatctaatctagcaagaccatttagccaaaaccagcataaaccctaaagcgagcagcagctaatagagctaaattgagaagctaagaatatgttaactaagatatatgataataatgactcgcgatatcgagcctaacacgtctaaagcgacatgttagccctggtagcatgtgccatagagatgggttacctcttgtgaagaactcgccggaaaacgagaaaagtaaaaagggtggtgatgcgctgaagttgtattggagttgctccccttttacaatgctatggggttcatatttatactccgagtacgaacttagtccattatggacaggactcaaaccttcctaaagttaagaaacaagcaagaccataaacgacggtctattgccgaatctctaacaaactgactcaatatcctaattaatagatacaattgccttaatcgagctctatctcttattggcaatgatggtaatcccaatctaggcccataccaagcccaagttatgtcatatcggctgtatcggctatcggcttcatcaacctcgatcaactccatattctattttcagccgatacgttatccagccaatgcgcagtccgactccaagttcagttagattcaacaccaaatctgcttcgatcttcttccttcttctctgaatctgatgccaaattctgttgttaacaaatatatgctataaaatgaattaagctgtcattggctaaagctagatataatataattgataataatctttctttattaaaacaatcttgatagattagacctaaccgagacaatatatgattgaagatatataataaagacacgaactagacaattatatgatatcttaaatattagttgatgccatggattaattgatagcaagcagatacctcatcagcttaaactccgatcaaataatgaacaaaacttgtcaaattgagcagatctatctagcaaatcaaattctattagatcgaacctaatcaagacaatacgagattgatgataagtttgataagttaaaacgagccgatggactttatgcaacgtgattgatatattgaatctaactaagacaacaaggcaatctaagaaagagtctatatatcggataagcaacgcatgtaagaacttaattaaaatatcaccgggaaagtactaattatattgatacatgcgaggatgatggaacttactttttgccggagattgaaaccgatgcagcccgactcgaaattaagaactcgacaaaactagaactagggtggcaatgcgccgaaagtcgtatattgaattctggttgttttacaaagatcttgggcaaacatatttacacgctcgggttaaaatgattccacttcagacacgaattgatcagctcagaactatgtttacagaaaaggaaactaacaattcttccttaataagatagaaagaataaaaacaactataaaactgatgctatccgatacactttccaaccgtagcagttagaataacggcgttaatttatcctcttgaataggccttgactaatggaagttaccaaattccgtcgttaacttaacattggcgaacgaggagcgtgaccaaaacattgtcaaccgcttaccgagctctgcacctccgccctgacccaagctccggctgggctgcgccgccttgatcttggccgcatgatttctgctcccctcccgagctatgtacctccatcattcttcccgtcgtccattcttgagctcggccatgtcacaccacgctacgtggagggcccattgaaggcaatttttttttttaattagtggtgtttgaaactgtgaattgtatatggttgaattctatttattaattatatttatgtttgtattattgttactagctaaatgcccatgctttactgcaggtagaatgaaaaatatcgtaatatgtcatagcaaaaatatttttgtagcaaatatcttagtattgcttgtttgctctttcgattatctattattcacttgtttgtaccaaatgttagagtattccataatattagaaaatatcatgggacaatttgtaaaaattgtaaaagcaataggggtgacagattctttttcactacccctagagacttttaaacaagtatagatgttacactagatgtaacataatgaattaggggctagaaaattaatgagaagttgtaggcaattttaggccctctggaaatgagggatggtactcatttaattgatttatatagggattttcataaacgggctattgttcaatatgctggataaggtacttggatcatcgttgactccctttagaactggggcctatagaattattaattcccattatttgtttgccatgtttatatcagaaattaaattacccttggtgtagacgtacatgggccacgggaccctaggagtaggactattgggcgccaggcggtaccccccccccccgggccatgactaagaagaatgcagtggtcgattgatgtgtagataacaatcataaggacttaaggagtactggtattgaactaaaacaagatcattatgacctaatttggaatgatggagttttagagatttttataggaattgaaatgattcgcacgaaattcatgtaaagttcccgtattccgctaagacacattaaaattaatattccattcatctatttttggtagtcatatttccaaatctgaaaaatttatttttgatagaaatattttaatctaacaacctatcatcttaatgattttctcggatttaatgcatgactcttcattcttccacataagattggctacatgggcatcgagaaatgtaaatattaatgaatcgcttgtttacaaggaatgactagtactttctcggcttcacaatgtaagtcattctagcattttccatattcgtattgatgttaatgaatccatacatatacaatatgtatgtggaaaatgctaaaatgacttacattgtgaaacgggggaagtagcatgtgtaaatgaataataagtagaattacttaaccttggtctgtgtgccaacatgaaatataactatcaaaggtaggtaaagggagtaataaacaacactgcgtaccattcaacattgacaatcgaggtgattcactcacaactaagctattttttcttatgtggactataggttaaatcacccaaattaactttttaactcattataatcaaaatgccatctttattttatcttcattctagatttcagttaatgatcttacttgtgacatttagctagtgttctccaatttagggtctaaattgtttgatagtcaagtcagtcaaaaacgatcctaaaccgtctagacaatgcaattaattagataatatatatcataacgagtgtagaccataaaactgtcatttggatcatggttggtgtaggtaatggaccgttacgttgcactgttaatgcaatatgagctgaaactttgtggtactcccaaggtccaatgcccataaggcttagagtttggaatgggtttcaaacctatttcaagcccttctcctctgcattgttaccaccacatttcaccagccgctgctacgacgtattcatgccgccttttctctgttagttaccatcgtgaccttgctcctcctcagtggtggagtcaggataaaattatagtagggctcctcagccttttaggccttataataatttccgataaagtctattttagcctccttacaatagatatatggatttaaattttagggagggcttaatgggggctctaatattttatttgggtgtagggtggtctaaagaacccccagcccccacgctgcctccgccactgctcctcctgcccttttggtccatgactctactcttgcggttgcggttgcaacctgccactgtgccacaagttaaatgaaatatgttgtgtatttatatgtgtgtcaaaaatatgatgatagtatagtgtacgttatattgcctagatcgtgcagtctagagttgcatctagactctagacttgtttcctgtccatctagcttgtaggtgaaccctacatatagcagtatcctcgtatggataaccttcacattttcaatatatgatatggttgatttttttctcaaactttaatcatttcactggtggagagttgctttttagtcccggttcgtaacccctatgtagtcccggttttcaaaccaggactaaagatcgctatccttagtcccgggtgaaataaccgggactaaagatcgatctttagtcccggttggtaacacgaaccggtacaaaagatttatctctttagtccctgttggtgctaccaaccgggactaaagatcgataaggcagtcctagggcagttcccattttctttttattttcattttattttctcccgaatcaagttggatgtatatacccaaatcgcacaacaaatccccaaatctgactgccatgcatatacccaaatccccaaatcaatgtaacatcccaaatacaaatcctaaatcttacaaaacatcacaaatattaaataaattacacacaaatgaaatgcatcacaaatcgattatacatctcagttgattatacatctcagatctatgcaatgaatcacaaattgtaatagaagaaattatacatctctcaaatcacaaataaaaaaaagggggagaaccggctgcatgccacggccgccgcgcgctgccccgccggccgccgtcgacgcgcgctgccccgccgccggccacctcgccggtcgcggccccgccgccctccgccgcgcgggtcgcggccccgccgaccgctgccgcccgccgacgccggcctcggatgtgaggaggagaggggaggaggagaggggaggagaggagatgaagtagccagatctgatctgagagataggaggagaatatgaggaggaagctagtctgggacttaaccgattagatgtgggagagaaatatttactcccggttggttctggttggtaacaccaaccactcccggttggtaacaccaatcgggactaaagtggtaatctttagtcccggactaaagatcctcggcctcctgacatgcctctgacaggccacgaaccgggactaaagatcatctttagtcccggttagtattaccaaccgggactaaagatcaaaatttttataaccgggactaaaaacaatctttagtcccggttctttttgaatctgggactattgtggaatttgccagaccgaccaaagatggtttctccaccagtgtttattatttacatagtaaagtaagtaaaatgccaccactagatctgttattaaaagaatatttcattacttaattaaggaaagtgacaaaaaacaccactagatttgttataaaagtattttaagtaaatctaatttatttatctattgagtaaatttcacaaaactacatatactttggccaatttgtcgtaaaactacatatgtaaggtcatgtatcacaaaaaactacaaatttaacaatttaaggctaagtatcgcaaaaccacatattttattataaaattatcacaaaactttagatttttgggttgaaatctttagcattaatattatgtttgaattataatgtccaagctttatgattaaattgatataaaacctatagttttgtgataagtttgtttctaaatctatagttttgcaatagtccaccttatgttggtacttctgtgataaatttagtgttaaatatgtagtttttgtgatacatcatattaaatctggaattttgtaatattttggttaaagtacatgtaattttatgaaatttactcttatctatttaaataaatatatgtaaaaatatattagtcaaatggattaaaaatgtcaactgtgttattaaaacacggacgctgtacttgtagtaactgccaccaaacaaactccagtcatctttgaatcggattttcggtgacgtgaatcaagagaacgttaattttatcatgtgaccgaagtaaaactgtttttatagaaccactactactaaatttgagcgtactgttgaaatttgtgtaggttgattggttcggtttcttgtgatacaaccaactcacctgggttaagagttctaaatgttcccctcttcgactagagaaaattccctgtacctctgaaagtttgtccaatccactaaaatttactcattcactttcataccccctaaatttcagtttgtatcttttctataccccttccgttagttaaccattagtggaccgttaaatttctattataaactccattttgctctttgtatgaagaaaatataaatttatgatgtatattactgagtgtataaatttattgtaggcgaatattatatttgtgagtttattttgtgagatattatttaacaaaagtaatttttatctcgcgtaacaaaaataaattatcataaatcatatcttgcttaacaaagtcataaattatatttatgataatttatcttagatatgacataaaaaataaaatttatttattagttattaattttttttatttagcacataaatagatttatcctataaaaaatgtcgtactattataacaaaatatgctatatataattttaatggtaaaaaattaatattaagttatatctaaaaataaattttgtcatagataaaaactatttttattttgccttcagaggcgaaactaaaatattatttttgttaaataatatctcacaaataaactcatagatataatagtcgcatacaataaacctatacactccatcaatatactccataaaattatattttcttggtaccaatgggcaaaatggattttgtgacagaaatttaacggcccactaatgatcaactaacggaatgggtatagaagggatccaaatggaaatataggggtatggaagggaatgagcaaatctcaagggcatagaagggattgggtgaactttcaaggatacacagggaattttctctttcgactaattgttctttcagtggtaagcgatgcatctatcgatagcgagatacctgtggtgatttcataaatcttaacatataccggcaaagtctttcagatgtgtttattcgggtagagtgtcttgtaggttacacggcatttcttgagagaagcatcgagacctacaagatatatatctcacaaaaataagacaaagggagaccagggtaccagcctgcttcctttagaagagtgtgaagacataaaagatctaaggggagcctgaatgacagcccggtccaggatctgggatccctgtatccttgtaggttacacgacgttccttgagaggagcatcgagacctataagatatatatcttaaaagaatgaggcaaagggggaccagggtcctagcttgctctgggaccctggcatacctttgcccttgtatgtcacacatgcttcctttagaagagtgtggagacatacaagacctacatattaagatcttaaactaaggggggcctgaatcacggcccggtccgggatccggggcccccgtatacttgtaggttagatggcgttccttgagtggagcgtcgagacctacaagattcatatcgtaaaagaatgatgcaaagggagaccaaggtcccagcctgctctaggacccaggcaaacctctgcccttgtatgtcatacatgcttcctttagaagagtatggagacatacaagatccacatattaagatcttaaactaaggggagcctgaatcacgttccagtcagcgatttggggccccagtatccttgtatgttacatagtgttccttgagaggatcatcgagacctaaaagatatatatcttaaagattaaggcaaagggaaaccagggtcccagtctactttgggaccctggcatacctacgaccttgtatgacacacatgcttcctttagaggagcgtggagacgtataagatctacgacttaagatcttaggtcaaggggagcgtgaatcccggtctagcctgggatcaggggcccctgtatcttcgtaagttgagcaaatatctttgttgggagtagagaagcttacaagaaatacatctttagatagttagaaaggatagacttgggcaccggcttgtccctggacctgagcccacatttatcttagggtatctctccccttattaaaagaagagtgtagagacataaagtattaaatgactcaaaactctaagtataaggagtctgggtcccggcctattatgagacccggatccccttatacccttgtgaggtgcatgtatctccttgagaagagcgttgagacacgtaagatatacatcattgttttcttttcattaaagatttcttcgagaagctcgtccgaaaatagcttaactaccttttcagggacgcgggggcatgaccaggaggctcataaatgaagcaatgttctccaccataaatgaaacaaatttatggaaggaaccccaaccagtttagggtcgaaaagacgtggaaaggaaattagcgctaagtcattcggctcagcgggtgcttggacacgcgccacaaatgcccagcaacacctagtcttgccaaccgggcaaaaaaggagctctggcactattttgagtaggttgggagtcgccaggcccaccacttgccacatggtggggagctggagtagcccaactgggccagatccgtgcccggggagcccagggcaatgcaatcttggcgtttttggtaggtttctcgggaagattagaagggaaccagccggcattgacaagatggctgaaagacaatacggagggaaagtagaaaacatcaatgtgagcccctccttgagccataaaaggaaggggacatgctacaaaaaaggtatgtttgtttcttagttgaaaaaaaggaatagcttgtactttctatatccagatagcaacaaaaagaacaagaatagggttttactacacctccgagtggcttgaacatgtgtaatcgcttgtgtgcatttgcttggcgggatgctcgggcccagtatagtttgtttcatttaagttgcacgctgctaacccctggttggatcttcacatcggggaggggtctgcacttccctactgtcggagaaccgcttctctgatagtactccaacaatcctatgaaatttgtatggaagggctcaaaacatggatattttagaaagaagttttagtatgaggtccaacttgataaaaactttctttttgagtctttatgtctcctctgattcccttgcttttttttactatttaaatggtttatcatgtattttttgctatgtttcgtaatccttataagttttacacttgcacttctgtcgaaatatttgctaacacccttgccccaaaatataaagaactttagggttgcgtcatattaagaaggttgatgaaataaaataccaaaaatgttgtgatttattgagaatatgaggaaggtagggaatttgagtggtggaaggttatgattggttgaaaaaagaatataggtgaaaaaattgttaaggcctattcgttttggtggaatttcaaatgatttgaattcctaagggttaatttctatgagttgcactcaattcatatgaattagatataggaaaaccaaaggaatttttcctttcctaaaaattatagagagaaacataggaaaatttccatccactcaaacctcatgaaaaattcctctgaattaaagtgtgcatgtatttatattccttcatttttctattttgttgtgttgatatttctccaaaatctttttattcgccaggctagcagaagctagccaaaagtttattaagatttgggaagagagttacaagttagaaattacgaaggttacatacacatttctctaaaatgaataggtccttatattttaagacgagagattatagttttctcgatcctatatttcacggtcactctaaatatagacttttgcacgcactgtgccatcgatcaaacctccataaagctgctagtacaatttatgtgtgcatgaacagttgaaggggagagaatttggtcacgtggtggtggacgtatgcatgtggaagacaaagctggtttggtaggtataccggcacatatatatgtagcatacaagtgttatgaacgacgtatagaaatacaaagtaaacgaaaaacaatcacagcggagacacacgatttaacgtggaaaacccctttaatgcgaaaggggaaaaaaccacgggcaccagccagcaacaatctcactatctcaagagttttgggttacacgcctatggcggcttacaagagaatcaagtctccacgaaaccctagcaaagggcatatataccgtaccgtaccgcggggcggagccgaaaaacaatcacagcggagacacacgatttaacgtggaaaacccctttaatgcgaaaggggaaaaaaccacgggcaccagccagcaacaatctcactatctcaagagttttgggttacacgcctatggcggcttacaagagaatcaagtctccacgaaaccctagcaaagggcatatataccgtaccgtaccgcggggcggagccgaaaaacaatcacagcggagacacacgatttaacgtggaaaacccctttaatgcgaaaggggaaaaaaccacgggcaccagccagcaacaatctcactatctcaagagttttgggttacacgcctatggcggcttacaagagaatcaagtctccacgaaaccctagcaaagggcatatataccgtaccgtaccgcggggcggagccgaaaaacaatcacagcggagacacacgatttaacgtggaaaacccctttaatgcgaaaggggaaaaaaccacgggcaccagccagcaacaatctcactatctcaagagttttgggttacacgcctatggcggcttacaagagaatcaagtctccacgaaaccctagcaaagggcatatataccgtaccgtaccgcggggcggagccgaaaaacaatcacagcggagacacacgatttaacgtggaaaacccctttaactccggcttgggcctccgctccgcttcgtcagaagcccggccaatatcttgaagtgaatttggaacaactccaacaaactccaccttgagacaaattcttcttgtatcataaatcaaccaatcatcttgaacaacaaagatagaaaaccactggtgccaacaatagtctcttggactattcaattaaaccaactaagcttgagcacaactcaaacttagcaacaggaataggctttgtcatcatatcagcaggattatcatgagtactaatcttgcataccttcagcttaccttcttcaatcacatcacgcacaaaatgatacttgatatctatgtgcttagttctctcatggaacatctgatctttagtgaggtaaattgcactttgactatcacaatgcaaacttatgcaagattcaactccactgagctcagcgtacaaaccttttagccaaatcaactctttgcatgcttcacaaatagccatatattctgcctcagtagtagacaaagcaacaacagactgtaaagtagccctccaactcacagcacaactaccaatagtaaacacataaccagtaagtgatcttcgcctgtccagatcagcagcataatcagaatccacatatccaataaggcccttatcagttcttccaaacttcaaacatgaatatgttgtgcctctgaggtacctgaaaatccactgaactgccctccaatgttctttgccaggattagacatatatctactaacaagactcatagcatatgacaaatctggacgagagcaaaccatggcatacatcaaagacccaacagcactagaataaggaacccttgacatgtactcaatctctgcatctgtactaggacactgagcagctgacaacttaaagtggggtgcaataggggtactaacagccttagcattttgcatgttgaaacgctgaagaactttcttgatataattatgttgactaagaaatagcaaaccagattttctgtctctactaatttccataccaagaattttcttagcactaccaagatctttcatatcaaactcactactcaacagcttctttaacttagtgatttcaatcttactcttggcagcaatcagcatatcatcaacatataacagcaaatatataggtgatccattaacatgcttgatgtaaacacagctatcatatttagatcttttaaaactgtgtgacaacataaatgaatcaaacctcttgttccactgacgaggggactgtttcaaaccatacaaggatcgcttcaacttgcacacatatttttccttgccaggcactatgaacccttccggttggtccatgtatatgtcctcctcaagctctccatgcaaaaacgcagtcttcacatctaactgctcaagctcaagatcatgtgaagcaacaatactaagaaaagtacgaattgaactgtgttttaccactggagagaacacatcattatagtcaacacccggaatttgactgtaacctctagcaactaaccttgccttatactttggaggctcgcttgaagataaaccctcctttctcttgaagatccacttgcaactgatggtcttctttttcttaggcaagggtacaacctcccatgtactgttcttctcaagagactgcatctcctcatgcatagcagaaatccaattctcactatcaccacaacgaacagcttctttataggttgctggctcatgaacattctccacctgttcagcacaactcaaagcatagtaagacaaattacactcttcaataagacgtttgggaggttttgttgtcctttttgacttgcgttgagcaataggtaattcctcctctagctgcaaaataggaggagtttgctgaacatcatcatgagcatcatcatcagcaacatcattattatggtcatcctgctcatgaacaggctccacctgaacacctgtataatcatcaacatgctccacctgcatgtgcatacgctgcaactctttttctggaacatgttctgagggcaaactgttagtaaacatcacagattcattgaatacaacactcctgctcataaaagtcttcccagtttcaggattccacaatttatagcctttgactcccgaaccataaccaaggaaaagacacttaacagctctaggctctaattttccattgtcaacatgagcataagcagtgcatccaaaaacttttaactgtgaataatcagcaggcgtaccagaccatacctcaataggagttttcttatttagtggaatagaaggagacctgtttatcaaataacaggcagtacttgcagcttcagcccagaaacgcttgttcatccttgcatgagacagcatacaacgggccctggatataatggtcctgttcatacgttcggccacaccattctgttgtggagtatggggtatggtgtgatgcctaacaatgccttcctgtctgcaataatcattaaaggcatgcgaacaaaattctccaccattatcagtacgaagcaattttaccttcctttcagtttgcctttcaatcattactttccagttcttaaaagcagtaaaggtatcatctttatgtttcaaaaaataaggccaaacctttctagagtaatcatcaataattgtaagcatataacgagcaccaccaagtgagggcttcttagaaggaccccataaatcagcatgaacataatcaagaatacctttggtggtgtgaacagaagtgttgaactgtacccttttatgcttgccgaaaatacaatgctcacaaaacttgatcttactcgaagtgcagcccttcagcaggtttctcttcatcaattctgtcataccaaggtgactcatatgtcccaaacgcatgtgccaaaggttagtcttactaggttcatcattagtaacagcagcagcggcggaatcagaaccagttaaagtacaccctctaaggacatataactttgcagaattaagatcacctttcaaacaaacaagagaaccttttgatacctttagaacgccatctgaaccggaatatttgtaaccttctgcatcaagcgtgctcaatgaaataagatttctggacatccctggtatatacctcacatttttcagcgtgcgtgtcatgccatcatcagtcttgatctgaactgatccaatccccacgatagcacatgggttatcatctcccatccgcacaacatcccctttctgcacaggcttgtaagaactaaaccaatttcttttagtgcaaatatgaaacgaacatgcggaatcaagaatccattcatcatgaccagcaacacaaccagcaaatactaccagacaatcaccagaatcatcatcagaagcagcagcagaagcaacagagaccttaccatcctttttgtttttcctttccttagcctggaccttcttgcactcatcaatattatgatttttcagcttgcaataaacacagaaccttttattaccaggcggcttggactttgaacggcctctcctatcgtagttcttttcatttgaggttctgttttcagttctgcctctcacatgcaaagcttcgccctttgaggacgacgacccgtcattctgcaccataattttcatcttctccttgttttggagagcatcataaacttcctttagggttagttcatcacggctcaaaagtatggtgtcacggaaatttgcatatgaatttggcaaagaacataacagtagaagacctaagtcctcatcatcatacttcacctccatcgacactaggtcggccacgatcttcttgaattcagccatgtgggtgatcaccgaatcctcctccttcatcttcagagtgaacagcttcatcttcatctgcatcttactggttagatccttggacatacagatcgattccagcttcagccatagttctgcagaagttttctctgtcaaacactcctgcaaaatatcattatgaagatgcaactgaattagggcgagcgccttctgatccttgcggatctcctcagcagtccactcggccctcctcttgccgaagttatccagtgcctcatcatagtcatgagtctgcgccagaatcccccgcatcttgacttgccatagcgagaaccgcgtgtcgtagttcagcagcggaagatcgaacttcatcgacgtcgtcatgaaccctaacagcaaccaaagctctgataccacttgttatgaacgacgtatagaaatacaaagtaaacgaaaaacaacaagatggggggatactggtggatgcttgtcccccaccttttcttgctactgacacgaaagtctatgcctacgaggctatcacaaaaaaagacattgctactgaaaaaaaaaggaccgtgtgcatgagcctgatcgcatcgttgtagtattttgcaatgataacgtgagcatttctgagctgaataataattagtgagtatatggacaaacagaaatactgttacaccagtacatggcggtttgcaaaagacgcgaagaaagacacgcttttcttaccttaccacaagggaaagcttaagttgagatgttgtgatacttttttttccctctgcaagtagcacgaagagaaactgcacactgtcattgcttgtctaagggcatgtataaaagtgactctaatatgagctctatatattaattaatgccactaaaaactatcctctttacaatagttgagacaataaaatttctaaaccattaatacactaaagatatttttattatacttcttttcttttctacactctcatacaataaactttccgttaataaatactaagagtggactctgagccgttgtcatgtgtaccaacaatgtttctccttacttccctctccctcttccacgttaccaaatttacttgcatgataacgtagatagcctgttattaggcattattgtacatgccctaagtctgattttctgatagagtaacatgctgggtgcatgcatgtatccagtaccatgatgtttgtagtatttgcagacatggggttaatagctaaggcagaatctgtgggtgatcagccgcacgatacatgaatacagcgtcaagtgcacctaaagagaatcttccggccgggttgaaagctccactggaacgcgaaggggccagccagccagtgcgataattactcatgccgctgttgacgcgttgaaactcgaaacgtttgtgttgttctagtaatgttttgctttccctgcgttgcaccggggcgcgccgggccaccaccggcagagagagaggttgcatcttgcatgcacggtgaggcccccgaacttgggcagagtttggagaggtgaggtgcagtctgctgcaacgtgtaaaggagcgcgtggaaggacgagggcagggacgatggccacagctagccccacgccggtggcgtactgtcggtagaggcgcgccccgcaacgctgacaccccaccaactcctcgtcgtctccccccgcggcccccaaaactttttcaccgaggaagcccgggcggccggcgcccgcgcgggttgtgatttgtgaatcgcgcgcggagcatgcatgcgggtgctggtgccccgtctgccgtggcgcgggtgcggggtgcaggcgcagccgcgcaggcgaggcgtgtgtttcctccgtggtggcgagtgggccgcgcgcgggaggggagtcggaatggagcagcgagcggtcagtcggtcaggcaagcagcctgcctgccgctgcccctgcccagcgcctttttgcctttttcgtagtggccggtacgggtagctggggagtacgtagtacgtacgtgtacgtcttttttgacctgtgcggccccttctcccccacctggttggtccctcctctgtttgcttggccccatgcctgtcgctgcgtatatgcatgcaatggacgtacctgccctgctgccctctgcctttttaatttcctctgcgccgtgttgtacatcacagcttgcatgtaggtcaagtatgtatgtccaatacgctagctagtcaaaacactgtggccaacgaacgtactacagttcatcatatatatacgtacgtacttgctcttaaaccctcctgcttgttgctaccatgcatgcgttttttaagttcaatcgactgtgcatctaggcaaacttttcttttttttaaaaaagggcaaaagccttgcgatgtgtgtattaatagagaaaatgtattacagtgccaaaatattcacaaggcaggtctaggaaaatcacagaggccagtatcgaagaaaagaaggcatgcgaaccatttgtacttattctaggagaagtaaattttcctaaaaatgataatgatcttttagccaattgagacatatatggtgaagagagctagagaaacgtgcgtactcgcttgacaggtatggacacggtccacacatatacctgcgtagacacaactttcagttgaaattttgttttactgcaataacagtttgtaaattttttttaaaaaaaatcggtgtttattttgcagatttgctttactgtaaaaatcggtttttattttctttttgaaaattgtagtatcagtttggcatccataagggggggaaatcactatttgtttttagaaatagtcggatcaggatggcgtgatcagggaggggtgaatgatcctcggttattttttcaaaataacaaaagtaaatacacagcgaaaataaaaaacaatgatatgaataattaatcaatcaccctcatactcaaagacttagacgctacagtaaatcaagcattaacagtgcacgcacagtagctctatggtaaaatgatcagcaaaccgactccaaccgaaataataagaactttaccaattcaaatccgttcaatgtgaaacttaaaacatatgttctagtcagagcctaggtttataagttttagtcaggaaacacgaaaaacaacagatgaaattaacaatatcttacaaaacattaatttgaaagcaatctgacaggtgtgcactatatttgattaaaaactaagaggcaatttcgctcttacccctactatggtctccaatatatattgtttttcttcctatttattaggttttcgtttttgtccctgttttttaaacgaagccaagttttgccactactttggattgataggttaatgttgttaaatttttgccaaaaagacatttctacacttaattacttgctgttgcatatttgcccctatttttgttcatcaattctgtatttgcccctttctgtacatgtatcttgcaattttgataaacttttacaaatatattgacacaaaattgataaaattttagaaggtgtaattagcggtggagagagctctgaaatgtgaggaaaggcgatggtaatgaggacctacctagctcctcacattgttctataactgctactcaagatccaacaatctctatcacacgaacacgtgcatgggaaattcaaaataagatgaatctattcctaagtactttaaattaaattatgatattagtgagcataatttactacctaatagttgcccattgcttgtacccagatttgagggaattgcatctttgaagattgaaagacaagatgaagagcttgccggtcgaattcgttgtttatggcgccaacccatactgttggaacctagggggaggtgtgggaagatggtaccagcgacaagatagaacaagttagtgtttgaaagggtcaattaggcctataggaggggttaataggctaatttaaaaactcaaataaatgcgaaagcagtgattttcggaatttctggaaataatttttggaattttcaaaaataacagagtatgcgcaaaaatctaagtaaattctagatctagctgcctaggagtcctcaacctctaagagatgatacaagtgctcacaaatcttcacaaagccaattacaacaagcactcacacaaacttgaatccacaactctctcacacacacaccaaatccgagtcaaacacgggtggagaggggaaacaagaaagcaaggcacaaaagtgattctcaagatgaaaaagccacgaaatatccaatcggtccagcagccctcacaagtggacagagtgggctatttatggccacagctccagatctgctcgttatgtacaataattgcatttttcagaaattctgaaaattaattttggacatatccaaaaatttccagaacaatgaagtcaactgaatatttttcagagattccgaaaaattttcggacaagtccgaaaatatctagaaccaaaatcacctttaggcttttccaaaaattccaaaaattccttgcggacaagtccgaaaatttctagaagaaatttttggttcgaagaattttttgaaaattccgaaaattgatttcggacaactccaaaaatttacagaatcatattttcttcttggttatttttggaatttctgaaaattaatttcggacaactccgaaaatttccggaagctaaatctggttacatctattttgggaatttctgaaaatttgtttcagacaactccgaaaaattccagaacacaaaaactgaggagaaacacttttaaaaattgattttgagcatatatatacatcattcctcatatgttaatgcatcatccctcttaatagtacagttttcccaattacccaaacaaatgaaaatatacaatataacctttgatcattgccgcaactcatgattttgtcgcatttgttgagatatgcagcgctacaaatcgtcatggactaacaatgcttcacattcacttaaataaacttgttagtcctctctaaccgtattgtcattaatcatcaaaataaattaggggcttagatgcacttttagtgttgatgtcgttaagtaccgatttcgaccatcaactaccccaataaatataggaagaattaacatttattacacgtatataagtattaaacaatgtagttccacttgtattgggggaatactatgtatgtgttggtgtttgttacgtgcacaaataaggctgtgtttagatccaggggtgtaaagttttagcgtgtcacatagtatatacggacacatatttgaagtattaaacgtagtctaataacaaaacaaattacagaatccgcctgtaaatcacaaggcgaatttgttaagcctaattaatatatcattagcaaatgtttactgtagcaccacgttgtcaatcatagcgcaattaggcttaaaagattcatctcgcattttacacgcaatctgtgtaattagttatttttttcgtctatatttaatactccgtgcatgtgtccaaacattcgatgtgacatggtgtaaagttttgccaggggatctgaagagggcctaaatccacaagcggaagaataccgttgtagtacttccccttagagtattccaagggtatcaaacacaaggaatatgtgggtatatagaagatcaggattcaactaagaacaccaactaaatggcaggcttaggatagagaggattcccatggattcgactagctaacttaagttaaagataaaactctatcgaatgattcgggcatcgaccctcccctcgtctgcaaggatgagtccggccttgtgctctatggtatacccgaacgtggagaaatgcaaaggatggatagggctattgccacctgccgcctacctcactttccgtagagcacacaacaaacaaaggcaacctctaactagagaccacgtctatgttatcgattactactctatccttggtccagaacttccttctttatctacaattctatccttggccaagaactttcttctttatccagactcttagcactagagcactcagttgcacactaagtgacgaacccgcaccgatgaggatatatctcacttaagtaaactaattaaggtctttggttggctcttctttatggatagagttaatacaagggatcttctggatagaaagcattgtgttcctgacaatgcaactgtcttttgcacctgctgctcttaaaatataaaggaaacaagggaacatcctttctttacttgcagtttcagtatgcagtgttggagtgtgctgggttggaattccagcacttcccaggagtttcatggaacttatacttttgactgcctggaatatttggaagcagagatataacctaagttttaattgaattcggcctgagcttctctcttggaaaaggagtttaaagttagatttgagggtacgtttatgtaggctcaagtcgattcatcgtcgtttagtgcaatcatggattgaccttttgtaatctttgtccttttattcttttctttcattttctctgtctttcgtaaataactttgtctttaatctaatctataccgttgaggcctcctccactgtgatttcatcaaaaaacataaagaaatctcgaatacttactttataaaagaagcatccacagaggtataagatcggagagagcactgacactctggcactcctccgggactctaatggagagtgtgccagcaactccggcactcctccggaactcccccgtagagaactcccacctttggggtactccttttggagcttcccctcactctcttctcatttctaactctactacaaagtagcttaaatatcaaagtgagttgtactccacttaagctatgtgttttgagagtgagatgaacacatccttttataggcatcctatgactgttgtgacagttatcctggccgggaaccacacaaaaccgccattaggaagtcatcagggatgtacacgtggaagcagatggcgagaggagccaaggtcggttcagccgaactggtggttcggccgaccccttgggcccaccttctggcctctccgtcggctaagaggttgcttgatgggcacccaacatcttgtaccttggcttggctcaatcataggtggttttgattaacatgtgggctctccaatccttgtaatcgcgtctgattgttcggagctgtgctttcgtcgcatggcgggtgtatttttctccttaattgacctgcatacatagatttaccaaaactagtggaaatggttagttgtaaacccctaccactaaggtttgacggttaaagtctatacctaacgaccgtcaatagcatccccacacttatcctttactcgtccctgagtaaagctcatggactttactcgtccctaagtaaagctcacggactttactcgtccctgaataaagctcatggatctactagagttatgactttttgaccaataatatgacgcaaaaaaaaattccaagacatacctgtgtttgtgaaccttgatgtgtttaccatgtcatcttgggcgattgaagattggaacggtcctcgactcaagtcacctttacttcttctgatgaattaccttggtgttttttttatgctcataaaaacataacttttatatactcctcaattaattctctcgaatctcgctcaaagatgtttcaatcctcaccaaggcattaatgttgacttttcttatcctaccattctactaaggcttatgtggagctcatggtaaggaataagaaatggcatacttgcatcagatatattgtaaagtgaaatagacaatccaagaagataagaaatcatatagccatgttcaagcttgtgcacagtgcacctatgtgtggatgaaaatggaaaactgggagaaataaaaattggatggtgactcatttttgtatgaccctcctccttttactttattttggaaaacatggctttttcctatatttatctttttttttcatgctcgagaatactttatctcattcccttttgagcgttgttttcatttttctcctttttagctcatttctcattggcatcaaccattggaggagataccataaatgtatggagtctttatagaaattcttcttgtggataatgtcttgccagaaacaacgtaccgagcgaaaaaatttatccatctccttggccttgagatacagaaaatttacgctgacgaaataattggatcctttactggggtgattatgcggatttggaccaatgtccagtatgcgaggcttctcggtataagtgtggagacattggaagtaatggtacaatgaataagaaaagagtcctggtgatggttgtatggtattttctaatcattcttcatttggaacgtatgttagcaaacaagaagattgctaagttgatgcgatggctgttggtatttcttaacgacattactagaaatataattcccagcaatggcgcataaatacttctggtatattatggttacagagttcatccctaagcgcacggatataccattgtagcatttcaacccgagagtattctaagggtatcgtatttattttatcccatgggaaaatcatgtagagagagcttgactaataatttatatattacttgtgataatcatattctaaacaggggttaagataatccaagggtagagtgacacacaagcatgaactactcatcctcataataaatcatctaagctaagtggaacgaaaagagaaagaaaatatgttcctatacttctattatacatagtatacatacattctagttaactgatatactagctaataccctctatccgatgccctcctggtacttcgagaagccaccgctgactgctgagttccttacgacagcccgtcatgaccatacaaccggagctaaatatggaggaataccctccccaggaaattaacttaggattatatactggcgtgggggaatacccgtactgagctgtcaccatcaacggcccacctctcatctgcaatatataaccccaaataatggtatcccgtaatctagacaccatgtctaaactaccagatactactctaatatcatcatcatgagatagagtaattgcataagcaaacattatacccgcaccaaagcatctcccagataagctagccgtatattcagtataacatgaacataatgtaaagtaggcattcatatactcggaatgtatttcaataccataaatgtataaagaagagtattctaataaaagtacaaagcttacaaaagagaagagagaagctattagaaccatacccgaactctttcgaaggcttccggactcctgatttctattctagtcctattccaccagctagatactactaaactaaacttgagagaaatgagagagctattgcttgaggtgtgtgagtgaagtgaggagaggagctccttaaataggctgccaatgacggttgtggtagttagaatggtcggaattgccctccaactgtcattggggagtgatccataccgtccagccaaaacctggatccaacggcgccaggggaggttcagccgaacctcctggttctgccgaaccaggggtcagcccaacctggcccatattcggcaggtagcctcctttgttattctcctctgtagacatgtgaattttggcccagtgtgtcgtgtcaattctgagttcttgtcaattcatgcataagtccaactctcgacattgtccgattgatttatcatctatgttgatgtcgattctcctccactttattatcattctctgcaaaaaggttagtagacctaatactagtggaatattattgttctaacagatatatgcattgcaagcaccactagttttcctctattttagtaatattgaaggtcgaaactgatcgataacgaccgtcaacaatggcaccacaaagaacgtaaatgagttggaacgataagacacccaactgaacagcaccgacggcatgaatcatttcggtgacatgagcagtcatcatagcacatggccagtcgctgttattatctacaaccaccttctcggctctattaataggaatatttgaagcataagtacatcatgatgtcacttctatttcaggtgcacaaataacctagcaacgatattgatgtgtactttgagccgctagtagaggatcttgtgatactatggatggatggtgcacggatataggatgcatacaaacgagagtacttctagtgtcggactattttgttgacgaaaatatgttggtaatttttacgttcacatataaatccgtaagcgcacggataccgctgtagcatttcagccatgagtattcccaaggttatcgtatttatatttcggcaggaaaaggcggcagcataaaaatatgttttttatatatccttaatcaacctataattaattcaccgtggtctaaataggggttaggataataattgataaggtagtggaggatcgacccgttctgtagaattctgaagaactactgtggcagcaggtggagacatttctttggcccccttccaaataaatgtgggtagggtagagctcggtggagggttcaagaataagggcggtacgctctgctctctcgcgacctctactataatcaaaagactaaaggcccctacgaaagatgagaaaggcgaggactgaaatgactccggctactaaaaaggtttatgtcccatgggaaaagtttaggcttgtcttacctctctgctgcattcggacttccgctacatagtacttctgacaccggagaagatgtaagactgatctatcttttaaacttcaaaggtgaaaaatgacttccagttcacgagctccttcaatcgatagagaatccgtatcggttgtcgacattagttatagatggttgctattcgggggtgcttaggaccagaggtacatgtagaccggagaggaggaagaaaacttagaatgtcatcttttgcgacacaaccagggccctcttgcccaaattgaaatgttaaatccacgttgcgacacacaggagattcacctctataagaatctctagtacaaaattagcattaggaaactacgattcatctatacttctatattaatcatgtctagtatacactcaacatatacatgtttacaacataagacttcgttccaggcaccttggtactaccgagggaccactctttactcgcctgctagcgtgattatgacatttacgtattcttatatcatactcaaacgtggaggaatacaaaggacggagagggttgttaccacatgccgcctacctcactttctgtggggcacacctgcatccaacaatatttatctagcctaattaccatgcttatgctcgtaaataatatcagtaactccaccgggactctcaccatacggatgaacaaattggagctagagcaacctataaagctggttggaccgttatcgttgtagggattgactaccctaggatgaaacggatatacaaagtatatactactcatagaacatatactcaataaagaaatatatgaacgacgagcataaataaataaagaagataattctattaattcaactatagtcttacgaaaactgtaagtactagaaacatacccaaaactccaagaggactatagcaccgaagctcctaagctttattcctactagatactatagagaatacaaaatggaagagacgtgcttaccggacaaatggcggcgctgttagggctatggtggcgctcgggcaaccaggggtcaccggcggccgtaatccacgtgtggagtgggttttggatggggattattcccgatctgcttggtgtgtctgtggggctatcgcccacctttagttttcttcaggtgctatgggatccaggaaggaaacagtaccatgatcttgatcatcatcggactcgggcatactcctttcaggatcggcagattttgaagatcaaatcagaaccggtacgactgggtaagcctagggtcttatggacgagatcaaacactatccaaattggttatgatggatctggaatttgttctaggcatttttggataccctggtttaggcccggatgggagtcagttttgtatatctggccctttataagggatactcaggtagggggatctctgtgtttcaccctttcgttgaagacaggcagtgcagattggatctcgtcttggcatcagttttcccacgatcaatctatggagccgtctgctggtaggggcgatcaagggatcatcaaggcgatgattacccgcccgaagccgcaggacggtgacatgagtggtcagcaggggaaggaattagcattgttggggccgagttcgaaggattccacattgagggcgtcgtcgacagatgaagaaactctgaagttgaaagcaaaggaggttggggagatgagtcctcccccaacatgcaattcgagaagcggctacctgggtccggaggagttcacagagggagaggttctagaggatgatgaggatgcagtagaggttgatattgaggaagaagagatgaaacaggtggggcaattgacagtgttagccagattttactctctacgcacccctaacctctctgctctgtttgaggatatggggagggcatggaggctgcgttcggatatgagctataagtcgcttcgggacaatttgttcatcatcacgtttggggctgaaggggactacaactttgtcctccagggaggtcgttggctacataaaggtgatgctttactagtagctgctttcgacggcttaacttgtccctcaaagattcctttagaagtggttcctatctggattaggatttatgatctacctttggtgttgatgacaaaagctcgtggtgagttgtatggcagcaaatttggtcaggtcagggaagtggatgtggaagctgatgggaggaatagacatgatttcttccgtattcgggtagatctcctagtgaagaaacctcttaaatcgaagatagctatcaaaaacaaagttcaaggcaatgaggtaaccagacgcttcgatgttaggtatgagagggttccatatttctgtttcatatgtgggttcataggccactctgacagagactgtgttaagaaggtagctaataatgatgcgcccttccaatattctgctgagctacgctgctcgcctttgaagccatttgagaagaaggtgagcactgttaaggggacagaggcttcgactgcttctcacaggttgtcgttccgcaaggctggtagtgcaagctcatcttcttcacggagatatcagggggaacaatgggatgaagcagtccctccaagggtggacacacattacggctttgatgctcaagagaaagtgggagatgaaacacttgatgaacagttagctagtcagacagacaagttacatgtttcagatgaaaagggatagctacaggacatgatggctacaggatcgacaaaactgaagatgggatccatgtccgggttgtcgtcggcgaagcagcagatggttgacatgatcccggctattgcgaatttacatcaggcagcttcttttggggatgtttcttcagaagacactctcagtgtccataagagacgatccacagaacaactcgggaacaagaagtcagggaaagtccaacaagccttgctgcagcatgtgttggaagcagaggaagacatgaagaagaaggaaggtgcagggctgcaaggaagagaactgaagcgtttcaagaagacagctgcggacggtatgaatgtgggagaattggaagtgaccagcgccggggctgctggtacactggcaggtcctatgttgggatcccgccaggaacaatgagttgcctaagctgtaactgccgtggaattgggaacgccacgacagttcgcgacctatgtgccttggttcgcgaggcaggtcccaagttagtttttctttgtgagactagacaaaagatcgaaacggttcggcgtcttcgtaatagattaggtttaaaaagttgtgttggtctcagttctgatggtttgagtggaggtttagctctgttatgggatgagtcagtttttgtggatattaaaggaatgaatgaaaggtatattgatgcgtatgtgcgtttgtccccggatgctcctatatggcatgttacttttgtatatggtgaacctaaagttgagaacaaacatcacatgtggtctctgttgaacttgctgcgacaatcatctactttgccttggttggtgatgggcgattttaatgaaacactttggcagtttgaacacttctccaagaccccacggaatgaaagacagatgcaggcttttagggatgcccttcatatctgtgagctacatgatttgggtttcagggggctaccatatacgtatgacaataagagatagggagttaataatgtcagagtgcggctggatagggcggtggcagatgacaattggagtgatcggtttaaagagtcacaggttgaacatctggtgtccccatgttcggaccatgcccccattctgctgaaatttgcggttgaagagagccgacgggttaaacgcaaatgtctgcattatgaaatattctgggaaagagagaatgagctcccaaatattattgacgaggcctgggcagtagcaggtgataaaatgaacttatctgaggtccctgagcaaagtcatgatgtccttacacggctggagtaagaggaaatgcaagaatgtgggcagagaaattgagaaatgtcgaaaggagctagctgccctactggaatcaaactcggatagtttagcgattcggggagccacggataggctaaatgaacttctatacagggaagagatgttatggctccagcggtcgaggataaattggcttaaagaaggtgaccgtaatacacggttttttcatagtagggctgtatggcgtgcaaagaaaaacaaaatcaccaagcttcgggatgccaatggagttgttcatagttcgacaaaagtaatggagaatatggccacacaatattttgaatgtataagagagatgaaatgcttgatcactctcctataacccagcttatccaagggaaagtcacggcagcaatgaatgaggagttatgtaaggatttttcggacgatgaaattgcaacagcagtttttcagattggtccgctcaaagcgcctggtcctgatgggtttcctgcacggttttatcagtggaattggggtcttttgaaggatgatatcagtaaggcagtgaaggttttctttgatactggggtcatgccaaatggagttaatgagatggctataatactcatccctaaaatagaagccaatggaactaaaagactttagaccaatcagcctttgcaacattatctataaagttgtctccaaatgtctggtgaacaggttgagacctttgctggatgagttggtttctcaaagccagagcgcttttgtcccggggcgtatgataacggataatgcccttcttgcctttgaatgttttcacagtatccaaaagaatagtaatctgaataaaggagcttgcgcgtacaaactagacctctctaaggcttatgatcgagtggactagaaattcctggagcaggcgatatacaagttgggtttttcttgccggtgggttaactggatattggagtgtataaccacggtgaggtattcggttaaattcaatggaaccctgctatctacacttgctccttcgcatggacttcgtcagggagaccctttgtcaccctttctattcctgttcgtagccgatggtctatccttgctcctggatgataaagtggccaaaggagaattaacgcctgtgcatatctgtcaccgggcgccggggatatcgcacctcctgtttgcggatgatactttgctcttcttcaaagcaaacgtccaacaagcaaggatcatcaaaagagatatgcagcagcaacaagccaattgattaatcctgcaaaatgctcgattatgtttggagagtcatccccggtggaggtgagagaagctattaagcagaaactgcagatcgctaacaactcctttgaggataagtacctgggtttccccatcctagaaggaagaagaaacaaaggtaaattttagagtttacagaaaaagatctggaagagggtgctccaatggggagaaaacttgctgtcaagtggtgggacggaaattttcataaaatcggtattgcaggcaatccttgtttatgtcatggtgatttttcggctgccagattcggtctgtgaggacttaaacagattaactaggaacttttggtggggggctaccaatggggaaaggaagatacattgggggtcatgggacaacctgatcaaaccgaaaaaccaaggtggacttggttttagggatgttaagcttttcaatcaagcacttcttgcaagacaggcttggcatctcattgataaccctgaaagtctctgttctagggtcctcatggcaaagtacttccccaatgtttcccttgttgatacttggtttggaggcaatgcctctccggggtggaaggacatcgagtatggcccgtccttgctaaaagaaggaatcatctggcgcattggtaatgggagatgtgtgaggatctggagggatccatggctgccaaggaacttctcaaggagaccgatctcgcaaaagaacaactgcaggttaaaatgggtgtcagaccttactgcggatggtgtttggaatgaagagaaaatcaatgaacttttcctatcgatagatgctgaaataatttcaaaaattcgtatttcatctcgggaggaagatgttttccttgcgtggcatccagatgtacacggcaggttttcagtgaggagtgcatactatttggctctgaatctcgcgaaccagaatgtggctgggccgtcttcgggaggtggtaacaagtcttggcatctgatatggggatgtaatatcccccagaaggtgaaaatttttgcatggaagatagctaccaactcccttgctactttggttaacaaagcttaaaggaagctcgagcgtgttgccacttgtgtgatctgtgggttagaagaggaggatgcctagcatgctctttgccgctgcactcaatcaaaattcctgttactagcgatgcagagagccggttactttccaagattttcagatgattatagcgacaacccttcttggttttttatgcatctggaacggctttcggactcagagcgtgctgcttatatgatggtgatgtggcataattggttcatccgaaacgagattgtcgatgacaaaattcctccgtcgattgatgcctccaaaagattccttgagagctacattcaaacactgtttgaaatccgacaaaagtcgagggatgtgtcaggcaagggaagagttctgagattgattggaataggaagctccttgcttcctccgggcctggtttggcagcgaagaagagatgggtgaaaccatagcgagggtggatgaaagttaatgtggatggttcctttgatgccctgaatggaaatggggggattggtactgtcatgagggattgggaagggaaggtggtcttagcttcttggaaattcctcaagactggcagtagcgcacttaaagcagagctcttggcatgcaaggagggaattgcaatggcacgcacctggacaaactatccagtttaggtagaaacagattgtgatgtagctgtcaaaatgatgcagtccaaggacaaagagctctcagagctagcctatgtgatacgcgagattagagatctcctcgctggaaatcgggaatacacacccaggaagacttacagaagccaaaacttagtttttttttactggaaatactgtcaggactttgcctcgcagtgtaattttataaattgaaaaagttatttacaaattataagagaataaacaaaagagatcaaaggatcacattgtttgtaaccaatcaaaaacaatctgttttagcggatccttcattctgcacaaatgcagaagaacttcggctttgaattaagccctccaagaactgaacgagggaagctcattgtgaaatttttttccatttcatcgcttccaaatgtgccaagcagcaatgaagaaaatttccaagaaacctctctgattgaactgaatgcgagccaaaaccaccatctaaaaaaattctaggccaggattccatgtaattcccaaatgttgccagcaaagttgactgaaagggcagaagaaaaaaagatgttatcttgtctccttgatattattccggcataattcacaagtgagatcatctttttcctttgcacaatgtcgcctatccagcatatctcttgtgttaagtctgtctctgaataaaagccaagcaaaaactttaatcttcattgcacatttggtcttccagatccagacaaaaggcctcgacacatgcacatttgagtatgtcagcttatgaaacctcttagctgtgtatttgtcagagttccggatgaaagaccattcatcaccattaccgttcagcagagagagaagaccattcctcctctagaacagtgaattctccataagcctgggtgctcaggggcagtaaaaaacaatcctcaagaggagtagaacctatttgcttaatagagagagttttatctaaggcaaccatatataaagatggaaaagcattgcttcttatcttatcattccaaatgtcatcctagaaaagagctgaagatccagtcctgatatggcagtttgagattcccctgaaaacatcagtcagagccactatatccctccaccaaaaagatcctttattccaaactaaatgtggcactttagagctataataagagttccatatcagttgaacccacggcagatcatgtcctttgtaaaatttgactagatgtttaagcagaagcgctatattctgaactcttagattgatgactcctagtccaccttcatcctttggtctgcacactagatcccaagaggctagagatcttctggttgaagttggattgtttcccctccaaaggcaatttttccttgcagtgtcaatagcttttaccactgaaacaggcagctgcaaagaacacatgtagtatgttgggattgaggaaagcacagagtttatcaatgtgagtcttccaccttgtggcagaaattgtgagcttgctattaatcttctttctaccctgtctaccaagggtgcaaaatccactacccttggcctagttgttcccatgggcaaacccaaataagtaaaaggcattgtgcctatggtgcacccaagcacaccagcaaaaagccctgcattctcatgagataaatcgattgggtagagacaggacttatgataattcactttgaggccagtagagtgtgcaaatgaattcaacaatgccttgaaacaaaacacctctctctccgaagctttgagaagaattagagtgtcatcagcatactgtattactgggaaacccttctcatcaagttcattaattggcttggtcaatagactgttgacgtaaaacacgaggcctgggagatccgcttaactccagtgcaggtccaaagctcgcctttgggtttgttagcgtgccagttgatttgatcctgcaatcaacaagaaatagaaacaaagagatcgcggttaaatctataaatgatagccaatcagctaagtgccgatgacatatcatttatctttgagccgatgtcatatgtaaatcgatcggtgactataaatagataataaagaactaaacctactcgatcggctgtagatattaccaatatatagttcttatatcgatatatatttaaatcaagtgattgggatagatcggtcaccatgccgagacagtataaatcacttggatcgaaatatatattaataacaggactatatatgtttatagcatagccgatcatatagatctagcatgtatcggctaatactccgatactactctatatcaggatattaaaacaagtataatatatcaaacaaaagcttaatatacttaaatgaaataagatcttggcataaagggcggatttaacatgtcactgaagcatatagagcgaatatggttaaatcagataagaccgactgaagctccgatactaccctaatcggcaatcagaaggcaggctagagattgatattctaagcacgacttgatagatcaaactcaactaatgcagcattaagtataaaaaaatgaataatatctagacaatcaagccgctggaagtttcatagagtggtagatatcttatataatctaaatcaacatcaaaatctaacctaatcggctgccctctactaacagatgttagccgattataggttagatagcgatcttgccagagattatgtacgatatatgataacttgatgaattacgtaaacacgattagagtatcataaagatggaagcactaatcccgagaacacaagccgtcataacaagttttacctcttattgaagatcgaaaccgatgcagctcaacccgaaagcaagaacccgtcgaaataaaactaaagcaaaaaggtggcgatgcgccgaaattgtattgaacgtgtgtgttttttattacatagggctcggggtctatttatacccgagaattacaagatatgtccataccggacatgactattatctctaacaaactctaagataccataagtctttgcggcagacttttgccctaagcatatctctatggaaattacataaaacatcctaattaatagatacaattgccttttcaggtctctatccacgtgcggcaatcatcttgaagcatatcaactcaaacccaatgttggatacgagtcatattgctggaatcggctgtatcacctaacccagtctgattcagatttagccgattctagtcgtagccgatctggactccagccgattcttactctgttcccgcaacaatccttatctctggttccgcttcgatcccatcttcacctccgatgctgatattaccaaatttggtcgttaacacagacctaaggagcaagctttgttaattattctctgcagcaactcagcaccaagaacaaaaaagcaatggtgagagtggatctcattgcccaaccccccttctgcatttaaaagagtttctaggtaccccattaagtagtactgaaaaatgtgccgtagaaaaaatcatctgtatccactgtagccacttttcaggaaaccccatacatttcataatggatatcaaggtggagtgctctatagaatcaaatactttagcaatataatttctctctttgactactggcattgatgaatatactctaaagaccatgctaaacagtcttgaattgtcctgcctttgataaaaccatattggttctcatgaaccagtttaggcattacactctgcaacctatctgccatcaatttggttatgaactttaaactgatgcccatcagtgaaattggcctgtaatcattgactgtttctggagaggacttttttggcactaaggttatgtaagacatgtttagcagctgcagatctgtatagcaagcatgaaagtgagctgctaacctgtaaaagtcctgtgatatgatttgccaacatttcttaagaaagaacccattaaacccatcaggtccaggtgctttgtctgatggaatgaccttaataagactgtccacctcctaagtgtagaactgattaaccaaacaatccaagttttccggattggggaagagatccctcaaatcaaagtccattggaggcaagagcgaaattcccattctgtttttgaaactatgaaaaaacagatctgctttgtgattgtgtccagtggctatctgcccatgctgatcctgaacctgagaaatggagttcgatctatatctttccgtagcaatggcttggaagaatttagtattttcctcacccaataatatccatctattcgtgctcctttttttttccaataaagccttttaaactcaagaagcataaggatctgtattttgataatttctctgaagttccattcaaggatggacaagggccgatgctcttctattaggtctaggaaattgattacagcattacaattaaccaaaagggcagttaacttagacaagtttttactccaatgtagcaaacttttcctcaaacactttagcttgaagctaatgcattttgccggatcttcataaccagggtctattgcccatattctgctaacaagctcaaagaatccttccatttcaacccaataattctcaaatttgaaaattggagactttggaatcttggtatcaatttgatctacacagggcacatgatctgatatattcctggtcaatgggtggacagtagtgtttgggaaaaccaaagtccaagctggacttgtaaagatgtcacgcctagaaatttaacctaaatttccagactattttgcgtagtaaatccctgtccaggaccagccagggtacgcaaaacgacaagtaatatacagttccaaacgtaaataaagcgtaaaatacttacggaagagacacttagtcctcacaccgaaacagaacgacagcagcggaaaaaggcgatcctagcggggcttcagctccactccacaggcaaaactcaactggggtctgagccttggtcctctaacttcgtcttcagctcagaagaactacacttctgaaaaggggaaataatagcaaggctgagtacaaccaccgtactcagcaagccacaccaacgatgcagatgtgcaaggggatacaaggatggtttgtggctatttgcataaaggcagttgtaaaacattttattgagcaaaacagtaaaacggttgagtaattaaagtaatattgaatctccactgatcaacgctacaccacgttgaacaggcccaaccaacccacctggactacagtgcattgagtcgatttattaaggtgggactaatcacggtgaatctggtcgaccgcccataaccgcgggcacggctattcgaatagttttactctgatcagaggtgtacaactgtacccacaagacagccccacgacacgtttccgtgcaccgacatgccaccacgacatatcggaaagaggccgtgacaggacccttcgtataaccccctctaaccaagcacaccacacctcaggtttcacccccactcctcgcaaggcagcgggcagtcccctctcgtgcctaggtgaatccggaagccgcataggccgtcgcagggcccatccaaactccatcacgcccacccttgcctggatgcgtcggctagaggaaagctacactacaagcccagccgttgcccacgctggcttgtggtaagtacgataagttcttccagggcatcccgcgaaccggtccttaattgccatgggtgcgactagcaaaaccatgcacccacagcccaccattcagtcgcattttagttggataattacgaccatgaagcatggccagatgtctcgagcacgcagctcattccgatactaaaaggtctaatactgtaattatcccatcaactgagctagtggtaattaagcatggctaagcatatagttctagctagttcacataagtaacatgagctagtcgattcattacccaaggttgacaaagaacaaatatcaagtaaacatggcacaagcgagcagataggtaatacccggatcccatgtaattagcaaaacatgcatatttatttgtaaacggtaaaacatttataaattgggatcaacatgctcaaggggaatgtgtgacttgccttgcttcttcacttggatcttctgaactcttatccttgcgaacgcgaacttccgaaacaacggattctacacgctggcgcgcaaaacgaggaaaactctaataaaaaccaaggaaacagtacataaaaactaaacaaacatgtagagctcaattttaaatgaattttgcaagttgaatggctcaattcggagttcgaatgaattagatatgaattttagaagttttgagccatttatatgaatttctagaattattcacgaattattgcgcaattattacttattttctcaaaggaaaaggctgtgctgacgtcatcaagggggaggggcggcgccggcaagcaggccccaccggtcagcgacacaagggcgtcgatccaccgtggaccgggaccaccgaggcggtccaccgccggtccacgggaaccgacggcccggattggcccaaagccgatcagatggccacgaggcggcgcggctggggcacgggcacggcatgaaaccggctcggccgagccatggtgcggggcagcgtgcggcctccggaggcagcagccggcggcgccaaacggcggcgagtaggcggaagacggcggcgctcacgggcagtggcgatgcacgcgaaagggaaggggagtgggaggaggggctcaccgagcgtgcggaaggcggcgaccgggcggcggacggggaagagcgggacgcggcgaaggaggcgatgcggccggcgcgtcgcggcggcagctggggtgatggcgaacggcgaccggagacggaaaaaaaaatggccggtagggtggcgtggtggggaggtggttctggtggtggaggggaaaaaaggatgggcggccgggcttgcccttgcggtggtggatctaaccgaggcagtggcgtggcttgaggtggttgaggatggcggctagaggcggccggaggtggtaggcagtggtgcacgaggcggcggtgttccggaggcggagaggggaaatggagtagaggccgggctgtggcacgggtccgcgaagccgatggtggtggcggattggcgcggcggtgggtggagcagcggtggcgggcggccggagctcgccggaaagcggcggtgcgtgggagcggcgtggggagggggagagagagcgcggctggctcgggtgaggaggggaaaagagagaggatgctccggggttcgttttgatagggtcggagcggcggaaacggggccgagaggggcggcaaccggcgcggaagtggggcgccgacggggggtggtggtggctcggccggcgccggtttttgtgggacgagcggggaaaatggtggaggacgtggaggggatcgtgcccacgtcgttggatgcgagctcgggtgcgggagggcgccggattttgcggcgacgtgggcggcaatggcggttggggttggccggcgagaggtaggaggaggagctgataggtggggcccacggtcccacctgtcggccggatggagagagaggagggaaaccgggggacgtaaagtagactttcgcaaggcgcgggccggccgagagagggaggtggcgcacggcccacgggagtggaggggaaggcttgggccaagcccaaaagggaagggaggggattttatttgttttctttttttttaattgattaaatgaactttgtgctattaaaattatttcttgagctccgaaaattcacagaaaatttcagagagtattttagggcaaaagaatattgcaaaatattcctggccaatgatttttaagggaaaattttaattctcccattaattcactcgaataaattgctttaacttttaatataatttcttgaaatgcattattaaatgattttaaaacccgaacgaaaatcggggcgttacaaaagacccaatcaagccgctccaggagaggactgttctgcatattgctccaggtaaaacttctcccttttaaaggaatttctagcagaccaagagaactaattacatcattaaaaatgaatatatcattcatgtcggcttccggcttatttctgtcctcaactgatcggtagaaattaaagtctcctagaaaaatcctattatccattgtcccaaaagacatatttttcagccaactaacaaactctgtacattctgggccactacatgggccatatatgcaggttaaggcccaagcttctgaagattgccttgaaacaaagtttactgtaacagaaaaactatttatttcccctggggttcccgaaaacactttagaggcccaaaccactaatattccacgtgaagcacctcttgagggtgagaaagcaaacacatcaaaacgcttagaagcaaaagtcctaatatcagccaaagagaaattttgttttttggtctctcggacatagaaaacctggcagccactttcctctatcttttgcctcaaagaaaatagtttggtatcagcattcatgcctcttatgttctagcacagcacattctaggatttaaacacattattcatgaggaaaacatttaggagtgcatatagatacagagctaactaaattagcctgcatagagccatataaaataagttcccagcaaacacaaaaggaactgacactgatcacagtccgacagtactgaaaaacaaaagatcctgctctgagcaaagaaacattattcattcctaatcatccatgtttggtcggggaagcttcttccttttttctccccctaagcttgattcagccacatcctcaggattcaggccacatagatccacccccatcttttgcaacaaagataaagaacaatcagaaggggaagaatctgagtttatatcatcttccagaacattgaaatcagattcagtaatcttgctgccagggataaggatttttgatatacctgccaactccttcagctttttagctgactttccccttggcttgcctattcccagtcgatgatcaaatttgagctattggttggcattaagaagcctagagctatgccttctagtaggattgtacataatagtcttcccatccctttttttcacaggagcaataggaatctgaagcactgctgggatgacttctggacttgatggctaggcttgcaaaggtgcaacatctaaaatctcctgatcagaatgcccatcatcagagggggaagacaataaagcccagctagaatgtgctctttttactacaggaggagcatgatcaaacattgccttccgctttaggagtaccagggtcatgaaaggggaactgaatggcagagatgtggggctaggaatttgagctgcctgcatgatttctttagctttgcatagatggtcaattttctccagcaatcctgccataggataaaaagatgggtgctttggtccttccctgtcagctatatccttgagcctggccagaaacagctgcacttgttgctcttgatcaatcagattaagctcctgctcctcttgattaggcaagataatcaattgccccgagttttcttcgacctggcccattgggtgatcctgaccccaagcatcctctatttctgcttccgcagcctgttgctgttgcacgagatcatcccaaacaccacctcccccctgattaccaggatgtcctagttgccaaatatttccatcatctgggtcatcggcattatcatcattaggcccaggctgtggtccagcaggaggtaaatcatcttcaggtgggatgtttgcaaaatctccatctagtacaaaaacagaaatagtccatgattcacctccaccaccattacccaaaggttcctgtaacactatctttcgggggacagagtcaagatccctatactttgctctcacaaacactcttcccaacatctgatctctatcaagctagaaagaaagttgtccaaaagaagctaccgctagatttatatggtgacgatcaacaaaatctagcgggaaatccaagagaagaaaccagccttctcgattaaagtggcaagcacgccagttctgcccttggtcatgcttcacaagctcaacagtatgcatcccatcatatgcagcagggggagagtttactaaggcatctctatgcatgactgaacgaagctggaacataccaactgtcgaagggtgacggtaagcagtacgaacctcatacatgtgtacttcaaagatataatccgagataagcgcccggtgatgatcccattcatgctcagggatggccggctctacaatggtgatgcaaacatcctcatgtcttcgaggcggatgctgtgggatggtgagatcaacacgcggcacacgcaagttaccaccttgatgaaccacttgcgcttgacgaagaaaacattgcggggtagggttgagatcagccattgcaagcgaggggaaattttgcggattagattgaacagtgttcctgggagaggaaggtatatggggagaaaccgccgtctttttggccggagaagatttagatctccaaactaagttatcctcagaactcagtttcggaaacttccccacaggttgatgggccttagtgggcctagtggcacagaagcaggacatatgaccagcctccaggcaggaatgacaccgaacaggcccagagcaattagaagcaatatggcccttatccaaacaacgcacacaggaaggcaagaaatttgaattcaagtaacgcagagaaataggatcatccttcgtgattggctccaccgtcttggtcgccagagtttcaccggcaataggaaccttcaacccttgaagtctcgtgaaaaccgatcttctctcctggagaagggccttcaaacattgaaacacgaatttaaccgagacgtctctttgttgaacagcttgggcataagatttgtctttctgaaccttagaacttttgtgcactgacctcttcttagaaggcaccaatgcccactcctcagcacaatcacggctccaagactcaaattcccactgccaattaggacccccatttctccagagataaaagcgaagggaaaaatcatcacaggaaaaagatctaagacgataaatccatagaccaacttgcttagagaaaacatcaaaagaaaaactccggtctaacaaatgctggacattgagatccgcaggagaaccaccaatggcggctcttaaagccaaagccacagaagaattggttaaccggaaattagctctcaggagatcaacagctaaccggtagtgcatagggctgaacttcaaagagaaatgcaccggagaacgaaatcgaagacgaacttcctctcgaactgcatcaccaggggagaagtcccaacccctcggcggtgccggcattaccattacggtgatcactagaaatcgcccatctcatcgcctccgtgaaatccggaagatcccccactgttctcaacacaactaaatcctgagagccaaaacttagttagtcatattctagctaataagggctgttgtgaaaacttgatgggattctggtgtgagaatgattgcacctttatctctaaaattgtaagagatgatattattcctgagtaatatatattcccatttccccgcaaaaaaaaagaatacaaaatggaagagggaattgctccttgaggggtgtttgtgaagtgaagtgagctcctctatttataccatccaaatgatggttgtatggtggttactggtccgctaaccgtgcataaccgccattggggtgcagcaggaagcaacacgtggaggatcaggccgagtggtgccaaccagggttcagcaaccaggccaaccgtcatactccaccgacttttgtcggtcgatgacgggtgggcccctatgatggttcctgggtggttggttccgccctgagtcggtttgagctgacttgtggggcgttcaatctgtgtgctcacacgtgattctccaggtgtttccttgaaggccagcttcatttctccttcactttgatgtataattcctgcatccaagttaattctccaatcctaatgcaactattatttattattggtacgcatgtaagaaatgctaatttttcctttattcattgtgctagttagcggtcaaaaatgatatttaagaaccgtcaacacaatataggactacacaacacttggtaacacatcgggccaaacagtgaagggcatgaaagcatgtgtgaggtgcctgattcaaataggaggcatgtggctgaatcactggcggaagaccgtgtacatgcaccatccgaggttccttaggctgaatcatccgtaccgccaaaatacaagtgatttcgacgggatggtggaagagggagcacgtccaaagttcataatcggtagtgatatatgggatgaggtgaatgatctcgaagttttatgtggtaaagggagtggaagcacacctgcatccacatcaagcggtgagagccctctttggaaaaagaagtctatctatcgtactggaaagactcccgtcacgcagttgatgtgatgcacgtggaaagattgtgtgcaaaaacatgctctgagtattgttgaacacatcggtcaagacgaaggacagtttgcaagcacgaagagaccttgaagacatgaatatcaggaaagagctgcatcctcaggacaaaggaaatgaccgctactacctccctccagcatgctatactcttagtgctgcagaaaaaatgagtacgtcagaatgtctgtagggtgtcaaagtcacatccggttagctgctaccactcacaatcaaaggtattcttccagataaggcctgagatccaatcagcaagttgtgttagttcttcaaagtgatgaatcacaaggttatcgattcagcttcgttggacaagcttcaggaggacgagattcgaactctttgccagctcgagatgttgttctctctctcatttttcaatatcattgtgaatcttgttgctcatcttgtggaacaagttaagatgctaggtccaatgcatctgcatagcatgtgtgtttttaagacgtttctgggcatcgtaaagaaatatgtccggaatagatcgaggcctggagacagtaaagtcaagggttgaattatagattacgtggatttgtaacttatcggtgtatctgtgccatgtcatgagggcaaaatgtttggaaaaggaacattagggcataagagaaccactgccgacaaaccacgagcatgtcgtgtaatattggagtacgtaaaatggctcatatgtccttatgttttcacacaaagctcatttgtccttattgtttcacataaaaggaacggttagagtataaatgcatattatctcatgaacgaaacttttgagttgcactgatttgtataccatattagcgtatcaggcacagatgtcccgagtcgaattttagctgagacatgagtgtggcctgaggaaggtcgatgaattgtttctttactcgttaaatcaaacttataaaatgttgaacgtactggtgagtggatcaagtctataggattacctgcactactgcacaggaaaagcaatcaaggcagggattaggtatctcaacgaatcattcgtacggatcagcgctgcaaccctgaagtccggtcaggttttcactcctattaaactaatagtttcgcatatatatttggtgaatgtcacgtaatttgataatccgtgacagtcaccaggggcataaacacttaccgtcaaatggattttactcgtctgtgtgtagatctgtagctagagcaattaatttaattttttatactgcgatggcattggcagcagtacctaacacgttccatgtacgtacggcacgataacaacaaaatatactttttgaacagtaatattcgaggcaaacactgaaccactgatgaatcatgaatggatacatttttaattagattcctgcagatttcatcgtagaaacttccgtagtattatatactggagtagtttactttgtacacggtagtaaactagtaaaatgtagaagcagtcacagctgtaaaaagttcaattgggtctaattaatatttccatatggcaatggaatgttttttgaaggttatatatatgtgcatggttatgtgatattccgtcggagataagtctcacggcctcatctttttctttatacttatcaaccaaaaacggatttttcaaacttgaatttagagttaaatttaggtttttcttcatatatgtttatttttcagcctttgtttttagatcgttaagtttacgtatataaaaattttatttataaattatttttcattcactggtggagaaaccatctttcgtcggtcggccgatttccacaatagtcccggatgcaataaaaaccggggctaaagatgatttttagtcccggttcaaaagggaaacgggcatatttgatctttagtcccagtttgtgttaccaaccgggactaaagatcatctttagtcccggttcgaatgctgtcaggacctatcaggcccccccgggatcttaaaaccgggactaaagatcccggtgatctttagccccggttggtgctaccaaccgggactaaagtcccacccctatatatatgtcttcttcctcctccagctgcccgagcaagcttcaaaattacttcaaaaaagaggggaggtcatgccaaaatttctattgaatttattttggtgattacatacaaatcggaggtgcctaaaaggtttgcaacttcatcctccaatgtttttttttgtcatactacatttgcacctatgttttgcacactttttttgtctccaaaatttagttgtaagttgatgagagagaaaatgtgtgtggggaagaaagaatatatagaaatttagttcatttgctaaacaaggttttataaaatagttgagaaggaaaactctagtgaaagttaatcttaaataatagaaaacaaactaaaatgaaaattaaaagaagtaaaacacattaaaattagtttaaaactttacaaatagtttttaagaattatttggtgtaatattttatgatttttgtatgaataaagatatcttataattataattattgtatgactgtcattattgtaagaataattatttgtgtgcggtttttttgactcatgtagatggatcggcaatggatgtacgctgaccggcggtccaaagagtttattgacggcgtgcactattttttgagagtggctgaagctaacaggcaaaggggttttatttgttgtccatgcaataagtgtaagaatcagaaggagtattctgcatccaggactattcatttccacttgtttgagtcggggttcatggcaagctataattgttggacatcccacggagagcaaggtgttgaaatggaagaagatgaagtggaagacgacaatattccgaactttgctcagtatgttggatttgaaggaaatcaaacgggcgaggaggaaatagctgctgatggtaacgacgttgtggatgatcttggtcagatgttgcaggacgccagggaagactgcgaaagtgaaaaggaggcccataaattggacaagatgttggaggaccacagaacttcgttgtacccaggttgcgagcaggggcacaaaaagttggataccactctggagttgttgcaatggaaggcaaaaaatggggttagtgacaaggcatttggcgatttattgaaactcgtcaagaacattcttccggggggaaacaaattgcccgagacaacgtacgaggctaagaagatagtctgcccgttaggactggaagttcataagattcacgcatgtccgaacgattgtatcctatatcgcggtgaggagtatgagaacctagaagcatgccctgtttgcaaagcactacgatacaagattagacgggacgatccaggagaagttgacgggcagctaacaaagaagagaattcctgctaaggtgatgtggtatttccctataataccacggctaaggcgtttgttcaggaacaaggggaatgctagaatgttgcgatgacacgctgaagagcgtcaacaggacgggatgctgagacaccccgccgatggttcgcagtggcgaaacatcgacagaaaatttaaagaatttggaaaggacgcacgaaacatacggtttggtttgagtacggatggcatgaatccttttggagagatgagcagcggccatagcacttggcccgttacgatgtgtatctacaacctccccccctgtctatgcgtgaagaggaagtacataatgatgccgattattattcaaggccccaagcaacctggtaacgacatcgacgtgtacctaagatcactggtcgaagatcttaaacagttgtggaagaaggaaggtgtccccgtgtgggacgaggacaaacaggaggagtttaacctacgagcgctgctgttcgtaaccatcaacgattggcctgcacttagcaacctattcggacagtccaacaaggggtacaaggcttgcactcactatatggatgaaacagaaagtacgtatcttaagcactataggaaggttgtatacatgggtcatcgtcgattccttgcagcaaaccacccggtacggaagaaaggcaagcacttcgaacataaggctgaccaccgtacgaagcctaaacatcgcacacggggcaaatatattatgcacacgaagcctaaatacatatatattatgcatgtatatacatataatataatataatatatatatatacatataatatatgtatgcatatatatgtattgaaacatacatatgcatggtttatatatatatatatatatatatatataaaccatgcagcaacaggggcatgcaaaaaaaaaaaggtcagctcgatctggactaaagatggctcagccacgtggccggctgagccatctttagtcccggttggtgttaccaaccgggactaaagatagatctttactcccggttatttcacccgggactaaagatagcgatctttagttccggattggtactcccggtttggaaaccgggactaaaggggggttacgaaccgggactacaatgggtttctccaccagtgatttccaaatatatcggttggcttattcaccgaataagcgaaacgatgggccgttagctagaaaaatgcggtcaatctttttgttggggtctggggagagatgatataatagaaaatcggtaattgtgatgggacactaatttagttatagaaaaatgatctcactaagatgaacttgtccattcaaaagttaattagtgatccctttctttgaaaagttgttagtcgccgatataccttatccttgtaatcacggtgatataccttgtaatcacgttaggcagatactctgaatcgctgatgtagtgttcagattgagggtgtgttccgaactttcaacttttccgtcacatcatttcaatttcaaccaaacttctaattttagcgtgaactaaacacacctaaactcggctttatactcctatctattactcccttcgtcctaaaactattgttcatgtccaacgtttgaccgttcgtcttatttgaaaattttttatgattagtatttttattgttattagatgataaaatatgaatagtattttatgtgtgactaaatttttaaaaaaaattgtaaattttttaagtaagacggacgattaaacgttggacatggatttctaaggctacacttatttagaaacggaggtagtaattagcagtatccgaagaatatactggcttgtcgctagctctttgatatacggccctgtttagttcgcgaaaagaaaatttttgggtatcacattggatgtttgaccggatatcggaaggggttttcggatacgaatgaaaaaactaatttcataactcgcttggaaaccgcgagacgaatcttttgagcctaattaatctgtcattagcacatctaggttattatagcacttatggctaatcattgactaattaggttcagaagatccgtctcgtgattttcatgcaaactgtgtaattagtttttgtttttatctgtatttaacgctccatatatatgttcaaagatttcatgtgatgtttttgggaaaaaaattttggaaacaaactgggccagtctcccggaataatgtatactgtgcaacagtgcaagtgtaatgtaattaagatgcatggatggaaatggcacaatagtcaacgtagacaggggttccaggagggagcagaggaacagatatacgacaaggactacctaccctgttagtagtaagcagccactgcaagatttatggtaagataatatgccaaaatgatcatctactggaccatacagtatgccaatgttggtgagagcggtcagaaacctgcgttaaatccttactggatacacgccctgcaataaatccttgtttgtcttgttcggcaacatgcatttgcaaaatgaagtacagtatatacattgatgcaggaccgtccagtgtgaaactacatcatcatgatcagttagcttcgggaaattaaatactgactacaatacatgtactcctccgtaaaaaaaaaagacaaactctatgttttcgtgtccaatgtttaactgtccgtcttatatgaaatttttttataattagtattttcattgttgttagatgataaaacatgattaatactttatgcgtgagttatctttttaattttttcataattttttcaaataagacggacggttaaatattggacatggaaacccacggtttatttttttagacgcagggagtaggacagtagaaaaaaaattataatctgttatatccaagttattttgggtgctgctctcagctagtgagaaagttggacgcagatactcagtagttagcgagaaatcagttcgaagcagataaaaacacacacaacgtgcgtgctaacctcgtccaagtagcttagcttaactccttaagcaagttaggctctgtttagttcatggaaagaaaatttttgggtgttacatcggatgtttgacttgatatcgcaagaagatttcggacacaaatgaaaaataatttcataactcgcttggaaaccgcgagacgaatcttttgagcctaattaagacatcattagcacatgtaggttactgtagcacttatggctaatcatggactaattaggttcaaaagattcgtctcgcgatttccgtgcaaactgtgcaattaatttttgcttttatctatatttaatgctctatgcatattgtcgacgtttgatatcgcgactacggtatttgtatagtatgtggatcgttggtactagggtatatgcgagattgaggtaaaagagatgaaaacaagggtttttatacaggttcgggcctttatttgacaggtaatagccctactcctattggccgaagccggtgttgctcctttattcatattaatcacacaaatacaatatttgggataacctatcttgccgtcgtcgacttggcggctagataaccaactcgtagtcgacgacagggtagtcttcctccttaagtacgaaattgtcgagattagagagggcgctagatcccttttgccggcttccgtaggcaccgaatggagtatgtctaggcttatatatgatgttgatatccgacggcgtgtgttggcttgtgtgtatgttgtgtcttatagctttgtggcgtgtcccctctcctcgtaggggattgtatttatacccatagatgcccccttgtccaagttgaactaaggagataaatatggaaacgatccgagtagtccttgtcattttcatatagaactctttttgtcattccttatccgaaactccttttatatttgaggtttgtttccgtataagatatgatatgtggtggaccctgccgagatttagccaactactattaggtatgtggtatccataaccctgacagtagcccccaacttcaatgcaaatgaacgagttgatgttcttgaccgaagagcttggaacaactattgtcgtgctcattggaccgttctcggtgagatcagagatagtgctagattccccttatcggcctttgtaggctccatattgagtttgtctaggtcccgatgtcgaccgagaaggtatggagcatgcgactaagtctcccgtcttgctgtatcaagaatttggattgaagtcaagaaatttcgtctcggtgggtacaccatcactttattccatattccttctcgagctccatcaaccattctcgagtaatctagaaggtgcaaagtctgcgacaaagccttgaaaatctgacttgactattctaatgtctgactttcctaaaatcaatactcaaaacataatattaaatagaaatagacctcgagcgaatgctcaaagggcaatatgtgtggaaaaattgaaaatctgtgtgcagtacgctcgctagagttgccctcagcaaacagagtttggtacccttcctagccccaagctgtttttatggaaaagccatttttcacaaagacagcttgaatcttataacaaaccatgctgaagctgacaaatcctagcccccagctataaagttggaaaacttaatttccgattacacggcttgattaatacgcatcgagtgagaacacttacatgaccaggttttacatggtccttcggctcttagaatctgacaagaccttacacatccgtttagcactcttaccttaggttttacatggtttctcggaggcttgtcagatcagcgtaaagggacaataggaccgccttcatgacaaggcgatataagaaaagaggatcaccggacaaatattgcacatataaacacttacagaagttgacgtatatgaagtgatgagacgatttctacaccgggtgaagacgaggtgtatagttgtactcaacaaatcgtagaggtagtgggagaattgctacaccgctggtcgaaggccagttatagtcataactcgaccactggagtttaaggtgcgagaggtcgctacatcctcttagttgataaccagaagtgagtatctctcgaccgtttgaaatagaggtgcgaggaccgctacgttgctggttgaaagactagtcgtagtcgtacctcgatcattagaagttgtggtacgaggaccgctatgtttgttgttatttcttaacgacattactagaaatataatttccagcaatggtgcataaatactccttgtataagggtgaaatgctataatggtttatccatgccttgcggatgaactctgtaaccataatataccaggagtatttttacgccattgccgggaattatatttctagtaatatcgttaaaaaataccaacaagcatttctggtgccgttgccggggattatatttctagtaatgttgttaagaaataccaacaagcatttctggcgccgttgccagggaagattcataaaagagattacctgaactaatattttatatttacctctttataatcactgccctttgcaggctaaccttggctgttttcacttttgttgtggaaacagggtagtgcatgactggtttcaacttgccagaaaatttcaaagaaaatccagaagctttcttccggagcgttaggctgcgagtcgctgctccgcagaaaactctaccgacagagaaaccagccgtaccaacactaccgactttcaagattatggctagcaagactctccgcgagttcgctgctccctctgctgacaatgtggccattgggccacagatcaacatgggagatgtggatttggacttgaagtccagcctcatcacgatggcgtaggctagcccattctgtggcaagcttaatgaggatgccaatgctcatctgcaacagttcctgaagatctgtagcacgcacaccatcaagggcgtcagtcctgacgccgtcaggctatggctgttttcgttctcccttctcgggagagcgaagtagtggttctatcccaaccgtgctgctatcaatacctgggacaaatgctttacggcattcctctcgaaattctttccgatggacaaaaccaatgcccttcgtggaaggatttcaagtttccagcagacaagggacgagtctattcctgaagtatgggaacgtctgcaggagtatgtggccgcctgtcctcgtcatgggatggacgactggctgatcctgcagaacttttacaatggactcacaccgatgtcccgcgatcacctggacgcggcagctggaggagctttcttctctaagacggttcaaggagccgttgatctaatagagaagatggtctccaatatgggttggagcaaggaacgactccagacccgtcagtgaggcatgcataccatcaaggagacggcgttgcttgctgccaagctagacctcctcatgaagcgattggacgaccacaacaaaaggccacaaggcatcgtcaaggccttggactcacacgttacgtgtgaggtctgcggcggcacgggtcactctgggaatgactgcccggaaacccatgaggaggcgatgtacatgggcaacaacaacaacgggtaccgtccacaaggaggttagcggtggaaccaaccacgcccatattatcaaggaggtaacaacaacggtaatttttctaaccagccttccttgaaggatctcgtttttgcgcaagctaaaaccactgatgcgctaagtaaaaaactcactgccaatgacaagatccttgaaaatataaatgttaagctagatagctttgcttccgcttttcaaaactagctaagcttcaataaaataatggaaacccagctagctcagttagcatccttagtccctggaaataaaactgggaggattccggggcaacccgactcctccgttgaaaatgttaaggcgatcacgacgaggggaggaaagtccactcatgatccgccataacctaaccctgcaggaactaatggaatatcaaaagaagcgccatctagtgactcggctgacaaggaagttccgccagaaaagaccatgccgtaggaatactgcgagacacggttgttgccgtttccccaacgaagtaggaaaccgtcagtggacgagcaattcgctcactttgttgaagtaatccagaagatccacatcaacgtgccgttgttggacgctatgcaagtgccaacatacgcctgttatctcaaggacatactcaacaacaagagaccactcccaacaacggagatggtcaaactgacggagcaatgcagcaacgtgatactccacaagctcccagagaagaagaaagatccagggtgtcctacgatcacctgctcgatcggggcacaacagttcgaccaggccttgtgcgaccttggagctagtgtcagcgtcatgccaaaaggcgtcttcgataagctcaacttcacggtgttggcaccaacaccaatgcgccttcaactggctgattcgtcagtccgttacccggcagggatagcggaggatgtgctagtcaatatacgggacttcttcatcccggttgacttcgtggtgctggacatagacacgggaaaagtgacgccgctcatcctgggacgtctattccttagcaccacgggggccaacattgacgtgggaacagggagtatccgcttccacatcaacgggaaggaagagaagtttgagtttcaaccaaggacggaacaatgctccatggtcaggataaagtacgggtcgtatccgcagaattatcaagtggtcaaagtggagcaacccaagatggacagcctggtcaagtttatgcaaaatttcctggagaaggaaacaacgtggcccaagaaccggtattataggccgtcggtaaaaccacccatactggccaagaagctagagcagtcggctcagaggaagccgctgtccgcaccaaagccaacgaaggtgtggagggagaagccaaagatgcccgctccatcacctccggagatgggtagaaaatccgcaaagtgaactgaaaggaggtacggtcttgcacgtcggactttaaatgacgcgaccttcgccaataggtaaattggtatgtatctgcatctttatttccaacaatttgaatttttgcatcatcgcatgtttgaatttcaaagttgcatttaggatttttgaggtttaaggaaatttttcaaatgaatttttcagagcaaaccaaaataacattttcatcgaaaattcactgtgccacgaccacactgaccgttggattccaacggttgaaagtgggaccggttgggcccaccaggggtttggccgaacaccctggttcggccgaaccggccaggccaacggtcggctgcctctctttttgaggcaatggctagtgggtcccacatgttattcatgaccgttgtgggtaccctataaaagccagccggccgggagagggaactccacaccatttcaacacattttcattccctctccaaagtttgctctcaagttcattcaagctttgatggattccctcaaattcaaacacttagttgcatatatgcaagttgctttggtgaaactaatcggcgggtgaaattcttgtcattcctaacccccgtcgagttagtccattcttgctccattgtgcagaatgtggaggcgattgtctcgtctgttaaaggggtccggctcttcatcaagtcatcatgacgagtctagtcctcgttcgtcagctgatgtctcgatggaagatgccgaagctccacgacgactcctgaaagacatcgacctcgaccttgtcagtgattgggagagagaagcttactacatgctgagcggctgggagtatgctcacacacgagaatactcaccggagctgctgaaaaagataggtatggatgttgaatttcgttctatttggaaagttattggttggcagagatttgctgtggtagatgagcctggttttcgttttcttactttgcaatttctgtgcactttgaaagaaatagaagatggaatttcctttcgctttttccataaggagtacacacttacatggaaaggcttaagtacacttcttggttttcacgattcctgtaaaatcgatctctagaaaggagtttctgggtttgagaaaaataggttttgggaaaatatttctagtgctccaatttgcaagaaacatagaacgactgatatccataatcctatgcttaggctcatgcacaaatggattgctatgactttgtttcctcgaggtgatttgagacccattaggggggatgaattgattatcatgtttgccatggttagaaaaatcaaaattgctcctgtgaagtgtatgataaggcaatggttagaaagtataaagttctctgctcctgttgagtgcacttctctgattactcggatagcaaaagggctaggggtcattagcgatcaaattgcttttatctcagctgctcatccgtgtattgatgagacttatctagtgcaagggcatattctgaaacatggagaagatggatctttgatttactttttccccggttgtacaaatgaaatcccattgccaaatgcggggtatcatttgtacaactgccatgaactaaccattcccctgcagaccatagaagaatctagtgcaggtggagcatatagtgagacgcgcaacatgacaacgaatgaacgagaatgttcatcatcctcaacacccgtaaagatgtatgtggcaggttgggaatcgactgtggatgcacccggatggacccaagctccacgccacagcatcagagtctcaacctgggcgagtgccagtgaggaccggtggcgtgcgcctcatgacatccaatggggggacaattaacctcccagatcaagtggtgtgcctccatctccaagtgaatggcgctcaagttcctctctttgggacttgggtgaaatctctaggagaatggacacccttaatatgcagacgggggagatccagtgcaacctcacggaacacatagctcaaacgcaagaatgacaacaatctgctgatgctcagttccccaacttcaacaacatgatgcagcaatagcacgatgaccttcaagcgtactttcgctttcagggattcaatccttatcaaggaccctgagtaaaagccaagcttggggggagacatctctccccccactgaggtaacttgtattacattgcatatttccctttccaattgcatatttgctttccaattgcatcttataaaaaataaaaacaacataaaaatttgcaaaaatagaaaataccaaaaagataggataggtttgaggcatgctgggtaagacaagctagttctctttgctgaaatgatgaatagttactctctcaaagattaaatataagtagccaacaattattcgggaacctgaggtaaatgagctgcacttgctgatctaagtctaagatgttgcgagatatgagatagtaaataagagttgctatgatcctgatactagtttaacttgaatttcggttgttttgtttttcaaaatgataaattgagagttcctcatttgatataaattcctaccagagccaaaaatgggctatcatgattaaaccttatacattttggttgcttgccattccattgaactttgtcaaactcttgtgacttgtgtagatacttctcatgctctatgatcaagatcatacacccacatatatgcacatgctaaactcctacattgggagctaagcaatattccattccattcccattttaccaccatcttgaattctccatgctttcacgtgctttcttctcctaaagagaatgtcctttcgaaaaaaaaagaggagggaaaggcatggttataaaaaataataataataaagttatgctccatcaggcatgaacatgatgttgaaaaaaaaatgtagccatgccctctcctaatcaataaaagaaggatttttgggagaagtaagcataaaggagaagcatttttctttattttttttcctcatgtagcattttcatcatataccacacacacattgcacaatcatgatcttgagtatgtttagttatctgctttagtatgagtttttgacttattaataaatgtgaatgcaagtatgccatgtttgatccctacctagctccacatatcaaaaccttagagtaggaatcaaaaaggcaaattggtaaggaattcatattgatacacttggcgagactgagtgaatcaattgaggaacttggctttcttttgcaaaatcatttgaaaacttctggaataagagttgaataaagattgggtgattggtgctctaattgctgttttgtctttcaaccgcgcaaggcaaggagaaacagagtctcgtggaaataaggggtaagggtaagccaccgtgccaaagattatttaatctgagagagagtacatataccttgcacctgtatctttgagatatgcagcatagtagcaactcctgatcaacaagcaagtctttgtttcctttcttccttcactcgggacgagcaaaggttcaagcttgggggggggggggtttgacggtcgttatcgatcagtttcgaccgtcaatattaacaaaatagaagagaactagtgatgcttgcgttgcacaaatatgatagaataataatattctactagtattaggtctactaacattttgcagagaataacaataaagtggaggagaatcggcatcaactcaaacgataaatcaatgagacgatgtcgagaatcagacttatgcatgaatgggcctagaactcagagttgacacgtcaaactgggctaaaattcacaagtctatataaaggagcaacagaggaggccgccagccgaaaggtgggctggttgggccagcccctggttcggccgaacctcccttacctccgttggatccaggttttggttgtacggtggagatgaagccccaatgacggttggagggtattacctaccattccaaccgtcacaaccatcatagttcggctataaaaggagctcctcttctcacttcacacacacacacacctcaagcaagagttctctcattcctctcaagtttagtttagtagtatctagctggtgaaataggaatagaatagaaatcaggagtccggaagagttcgggtatggctctagtagctttcctttcctcttttataagctttgtactttcattagaatacttttctatattcatttatggtattgaaatactttccgagtatatgagtacctactttacattatgttcatgttatactgaatatacggctagcttatctgggagatgcattggtgtgggtataatgtttgcttatgcaattactctatgtcatgacgatgatattagagtactatctggtagtttagacatggtgtctagattacgggatatcattatttggggttatatgctgcggatgagaggtgggccgctgatggtaacaactcagtatgggtattcctccgcgcctgtttataatcctaagtttattcccttggaagggtattcctccatatttagcctcggttatatggtcatgacgggctgtcgtaaggaattcagccgttgggggtggcttctcgtagtaccaggagggcatcggatagagggtattagctagtatatcggttaactagaataaatgtatactatgtatattagaagtataggaatagattatctttctcttttctgtcaacttaccttagataatatattatgagaatgagtagctaatgcttgtgtgtcactctacccttggattatcttaacccctgcttagaatatgattatcacaagtaacatataaactattagtcaatttctctctacatgatcttcccacgggataaaataaatacgatacccttggaatactctcgggtgaaatgctacaatggtatatctgtgcgcttgtggatgaactctgtaaccataatataccagaagtatttctgcgccattgctgggaattatatttttagtaatgacgttaagaaataccaatagtatacttggaaagtatttcaataccataaatgtataaagaagattattctaatagtagtacaaagcttacaaaagagaagagaagagctaccagagccatacccgaacacttccgaaggcttccggactccgttttcaactctattcctattccactagcttaagaacactaaactaaacttaagagaatatgagaaagctttgattgaggtgtttgttgaagtgaagagggtgaggggtttatatagcctcccaatgacggttgtgatggttagaatggtcggaaataccctccaatcatcattgggagctaatccaaatttggctggtggcctcctggacttctccactccgcagacttctaaactttggcccagttagtcgtgtcatttccgcgttcgtggcccgttcattgataagtctgattctccacatcgtccgattgatttatcgtttgatttgatgtcgattctccttcactttgtggttattctctgcaaaagggttagtgaaccaaatactagtggaatattattattctaatatggatatgcattgcaagcataactagttctcctctattttggtaatattgacggtcgaaactgatcgctaacaaccgtcaacaatgttgcaggtcaaataccagtcgtagttgtacctcgaccattagaagtcgtggtgcgaggatcgctacgctgttgatagaagaccagtcgtagtcgtacctcgaccatttgaagggaatccagagtaatagatggacgacattctcgtgacgtgcgagaactgcctcctgatgacgacgaagacaatgagggattatcgtagtcggtggttcgactcctggacctactacctcgtcctcgggccctctagaagtctagggatctcgagtttcgttgtcgtcgtgtgatgttgtgctgttgttaaccttttctgttgtcgtcctgatgtaattaatcctagacgttgtcgtcctgttgacaacgacgatctagccagtcttggttgtcgctatcacgacaatgttgattgtcgcgttaggtgtcatgagattgctgtaaccgactggtcgaggaacaggagtaggcgtatctcgatcacctgaagatgaatttttaggtggtgagagatcgctatgatctattggtcgaggaccaggtttagacgtacctcgatcacctattggcaactgacaggcatacggaaacaaaccgtattcgcgaaagcatctcttgttatccgtgactccccttatcaatattttccgtactaacttggtcaatcccggtgtaagatcatagagacatggagttttcgacaacgacagatggagttcaacggtccacaagtgaatttaagttgataggggtactagagttggttattacatgtgcatctcatgtggccagcatgactcacatacccaacttatggcatatccggatgtctattcgcaatcatgtcgggtgatcaagccgacaatgcttgcgaggaattatccgttaacaatctttcctcaaatagaccagccgtagccggcgctatacatgagataagtcatcagtctttgttggtaggttgggtgcgacaactcagcattttccgagaacgttctcgataatggggtgtactcaaccacaacttactcgagtgctcgattgttcctgaaaacattttctagaagacaagatatatagcagagaatatcgagcatgtactgaaaagactgcatgtaacttctaatattatcaggatataacaagcagattaaatatcaggcaatatgtaaaccgtaaataagcatgatttatacataaggaaatagagcgagcccctagcattaaaccgtagtcagcctaacaccggaaacactcgtacaatagatatcatataaaaaacatgctctaggtaaacttaataaagtatggatctgacaatattgtattgatatgaagaataggtacgataaatcacatatagaatattgcgtacctttgtaggtacatgccggatgtatctacgaaattagtagattaatttaaaaaattaatctcctaattacctgatcggtcttatttgcaggcacgcgtcgacaaaccaatacatgcatccctgagtacgtactgattcggcacattcgcatgcatgtgtatatctcacgagcaagcagtgcgtggtgatcttggacagtgatatattcaacctgaaaaaggtgaactatcatgtgctttcttgccacgtgccgtcaggatggatgttctcactatgcatcagggtccaaaatttggatcctagtcggagtgtgcgatgttgatttcggttcctcgaaggccggcgtcctaaacagttagcggcaatcaccgaggttaccaaaatcaattgacgatgtcacttaccgggcagtcgacgtcttgaagttcgatcaatctcgatagattgaattgttgatggggatgatttcgatcttgtcggaagatatactccgatcgggttagatctccctatagtcgaagtcatcgagtagcttgttgttggaaaatctatctcttggacccatctcgtcgaaatcttaaagcaccaaattcccctacgtggcgcgccactgtcgacatttgatatcacgactacggtatttgtatggtatgaggatcgttggtaccagggtatatgcgagattatggtaaaagagatgaaaacaaggatttttatacaggttcgggccctttatttgacaggtaatagccctactcctgtttaccgaagccggtgttgctcatttatttatcttaatcacacaagtagaatatttgggataacctatcttgccgtcatcgacatggcgactggataaccaactcgtagtcgacgtcagggtagtctacctcctcaagtacgaactcgtcgagatcagaaatggcgctagatctctgttgccggcttccgtaggtaccggatgaggtatgtctagtcttatctctgatgttgatatccggtggcactactacataaaagattttcctatacgccaccctcttttagttgtaggcagcctgtgaatggaaccgcacgggataatcgagcgactggtgccgggtggacgccagcacgggaaaatcgattattccgtgcgggcatcctaatccaaccatatgggataatcctcattatcccgtgcggtcgacttaagtggaccgcacagaaaaattgattttcacgtgcgagctttttaagtggaccgctcacaaaaatataatatcccttcctattttccctctcacccacttcaaattttttacacactatctcttcattttccctatttactcctctcctccccttccctctctctatcctctctctctccctctttcctctccacccctcctctcctcaccgagcgcacacggggcgtccaccgccgccgatggcgcgggaggcgacgcggtgcttgcttgcggaggcacgccgccacggcggctcggcgatgacatgccaggcagtgcggcgagcgatggagccgcagccgctccccctcgacaactacgacgacggcacgatggtggcgagctcgcggagaggcggatccgtcgtcggtgggctcgagggaggcagatctatcaccggtgggctcgggggaggcggatccgtcggcggggggctcgcacggcgaggcggcgcagcggaggcggagtgcgcgacggccgctaccgacgacgacgaggaggcgacggcggcgctgctgccgccgatcgaccactcctccccctcctccccacgctcgcgcgaggcggcctggagcagcgcccgccctccccacgcccgaatccggcgcggcggctgccccctgcccggatccgccgatgttggcggccagcgcggcggtggcggcggggtgcccggatctagggttaaggtttcaatttttattttcccgtgcgggcgacattagaacccgcacgcgaaaatcggattttctcgtgcgggggcgccacccgcacgcgaaaatcgcgattttcctagacagcccgctccagacgggcgaatctactgcacgggataatcgaaacaaccgcacgcaaaaatagcttctgtagtagtgcggcgtgtgttggcttgtgtgtatgttgtgtcttatggctttgtggcgtgtcccttcacctcgtagggggttatatttatacccatagatgccccctttccaagtagaactagggagataaatatggatacgatcttatacccatagatgcccccttgttcaagtagaactagggagataaatatggatacgattcgattagtccttgtcgtttccatagagaactctttttgtccttccttatctggaactctttctatatacgaggtttgtttccgtataagatatgttatgtggtgggacttgccgagatttagtcaactactattaggtatgtggtatggataaccctaacacatatgttcaaagattcaatgtcacgtttttcgagataaaagtctgagaactaaaccaggccttagatcggtaaaatcaaacaatgttaattaattagcagatactttttccgtttcataatataaaggatattggatggatgtgacacatcctattataatgaatctggagcattcattataataggatgtgtcacatcgtgtccagatttattatattaggatgtgtcacatccatctaatatcccttatattatggaatggggggagtactcatatataggtgtagctcatatgatgctatgagtacttatttcgaactagctagccactagtatatttaacagttaagagcgaattgcaaatgcactggataatattttgtcgagaaaatttcgtagccaaactgaccaaaagtgtcgcgcttggaattcagtcgaacagaagcaacagtatgatcgataattgtgctctctgcactgctgcctcactagatttcgtagtaaatcctttatttctatttatctatgaatgcatatatatatagtataaattgaacttcataacaattaacaagaacccagccctggtgtgccaggttctttatcctgcatccatactagttactgctgtctagtagtactattttttagcgaaattagactacagttgtttttacaaaattagatgcaacataactctatctactagcaacaaatgggtcagattctatcaaacagacaaatgtaggccctatttagatcccaccacaaaactttatacctgtcacatcgaacgattaaacacatgtatgaagtattaaatataggctacagaataactaatagtacagattacgactaatttgcgagacgaatcttttaagcctaattgctccatgatttgacaatatggtgctacagtaaacatttgctaatgacgaattaattaggcataataaattcatctcgaggtttactaactgattctgtaattagttattttattagtacccgaacaccacatacgacaacctatataatacacacgccaaaactttacccctaaatctaaacaacccggtagatgaaaggagaattttatttcagttggtacgtgccaattaagtggcagagtttgaataagctcactggtggagaaaccatttgtagtcccggttcgtaaccccctttagtcgcagttttcaaaccgggactaccaatccaggactaaagatcgctatctttagtcccgggtaaaataaccgggactaaagattgatctttagtcccagttggtaacaccaaccgggactaacgatggctcagccacgtggactaaagatcgagctgaccttttttttatttgcatggccctgttgctgcatggtttatatatatatatatatatataaaccatgcatatatatgcataatatatatatatatatatatgtatgtatatatagatatatatatatatgtatgtatatatagatatattatatttatatatgtttcaatacatatacatgcataatatatttgtatttatacatatatatatgttatgcaaatgcatatgtatatatatattaaagcgcttaacattttatgtgcatatatatatgaccaaaatatatatttacactaaagtaaatgtgtacatgcatatagaaaaatagacatgtattaattacaattcattatgatgtccgagctagctacgacttcgacgtagtagtaggcgttatctcagaagctaacgacctatgaattgtatttctctcgggatcaaggatttgttcgttgatgaatcccatgagttgttcttgaaccgccgcgataaattacttgtgtgtgaggttatccctcatgcgaataacctatatgaattaattagtcaacaacaaatcgatacgtacccaatgaaattttgaatttatttgtatgtacatcgagctctcttgtggtgatgatttggtatgcaaggcagtagcaatactcgcacacgtagtagccgcacaagttagttccctgggcttgcttttgcgcactatatatatatgacaaacggcgagagatctaattaatatacacttgtatgtatttgaattggagattcaatataaatgtagagcaggtgtactcacaggaaatttaaactttcgcctaagtctttctctccaattgccgcggaccaaacgacggaaccgataccaagccctacatggagtttaaagctatgattcgtagtagcaattaattataacaagattcgtaattaacattgaacttatgacagtacctgtctataagttcaaaaaccttgtcaaacgtagactcttttttatccattgagtcatatacgttaactacgcaggcctccaagtcgaagagtaaaaggacccagtggaatgtgcaatgtgcgtcggatgcattacatatgaaacacttagcttgttcgtacgggaatgaaatttggtaggaagacagtaaaaactaactctgtgttgtatggcaatagtatgaacatcttgtaatgctgcgccttcaggagatggacgagattgtcctctgtggcttgcggatactggtcgagcattgtgatgtttactttccgagggtcgatgaatccagtatcgaaaaccccccaccgtcgggccctttgaatctccattctacaacgataaaaggaagtatatattatatatggtgtacttatatacaaggacctaattaattattaaagaaaacgtaataagaaatctaactgaacgatacttacaaagtccaacaactcataatagagacatcgagggcgtccagctggtatagttcgtagatacccttgaaattgatccagagaatatcttctccttgcaagaagtccgtgtccctgatcatcgctccgatcatctctctaccggtggcgcttatctccatgtacagttgatggaatttgtacatttgtgtcggtagggactgcagctgcttaggcttgacaagcggtttactgagttcgtacatgtatttcacttccaccttttcgattggcgcgcctcgtagcaattgatccgtagttaacctggtgtcattaataaaatcttgtattccaaattcttcaccggtcaccaacggctcgatctcctggtttggttgctctccaagctgagggactggtttggactttccagaagatgctttcttaagtgttcgctcatagtccgccgatagctttatggcctccttggcaggtgcagacatacccctgaagaagttcctgacactcgggtctataggaatcttcttttctgaacttcgaggcttcaattgtctccttacttctgatgccacataagcatcaggctcctcttgcgtgcaatcgtaccccgggtccttgtttttggcggcgtcaactttcgccttcttcgttgcccttgtgggggcaggcggtggagcttggggggcccttgacttggaaggtgccagacgaggagcttgcggaggagtcggtgcaggagcctgaggaggagtcggtgcaggagcctgaggtggagacggtgctggagcatgaggagaagacggtgcaaaagcctgaggaggagatagtgcacgagacgccggtagtcacccagggaggatgatgtaccgcttgcgccatagtataatggtgtggcttgtgtctcgtagatgcgtctcaccgtctcctacagggtagtccaactcgaggtcctcgtacgtggctttcaccaactcaacttcgaccttggagtattctgctggaatcggcctgcagtgttaagtccctgaagggtccgttgggatggccatgcctgacgccaccttcacgtggtgagaggttatttattcgtaatcaacatatatcagcagcaatttgcggaatggacaagtctaaaatctataaactacgaacttacctttattgataagttcttgaagggaatatgcagctcacatggtgtccgctgagtgatgtcatcaacggggcaggtggtttcgtcctgggtttgcatggtgtccatgctatgtgatcctacctgccccgttgaggcgcagctgcttcgattgcctgaagggctgaccattgcaggagaaatgtacggctggggatcctgggactgatgtgcggccatgcgttcatccaccttccttgccacctcctcttgcatgctgagctcgtagctcgataccctttactcaagatctgcaatcttcgcctcggtatctctcttgctcctcatccaactcctgtacgtctggatgccctccttgaatccaatcttctaaggaatcgcccctttccctcgtgttcgtcctggatgctcgggagtcttcagggcgagtgacagctcgtccttctctctgttgggtcggaacgtgccctgagaagaggcttccactgcgtccgttagtcgactcgcagcctcgcgtatctgatcgctgaagactagggagccatcaactaggttgagcgttccaccatgagcatagtaccagaacttcgatcaatccggccatttagccgtggtcggttcgatacccctctcaagcaagcttgcctccatctcctcccacttcggcatctcgatgttatagccgcctgatcccaagtggtgatggtacttcttcttggcggcattttctttgtttctttccatcatcgcttgcccttgttgacttgtcttataagcaacgaactcatcccagtgatcccttagctttgggaatgtgtcgaagttcggtgtctgccccttcaggatgtatttctggtacagatctcccttgaagctctgaaactgttctgccattttctttagagtccaccttttcactatgttctctgtacccgcgggaagggtgaatgtctcgagcattgtggtccacagcatctctttctccgaatctgggacaaagctctcatgatctctgcgtgcccttgttctgcgccaggacaccgtactgacaggcacgttatcccggacaacccaaccgctgtgtcgtacgtagttcttggctgcttctgccggggcactaggtcggccgtcttcgtccactttcgttatgatgtgccgaccctctagcttcttcacggcacctcattgtccgcgtgccctcttctgtccaacggagggttgacttccactagcctcctcctcctcgttcccctccgcatccctctccacgtttccctcttggttcccctccgcatcgctctccacgttcccttcctcgttcaagtactggtttggatcctcgttcccctcttcttcgttccagtactagttgcttccatctgtgattatatcgtacaatatctgttcctcttcgcgatcagccatttgttcatacaagaaatatttgccaagtctataggtcatatttgctttaacaatcatatatgctaacaatcatatatgctaagtctaagtgtagtatattagaaccctagataatcattaaaactgtactaatcttgtattagaactctaacaatcatatatgctaagcctaagtgtcgtatagtagaaccctagataatcatatatgctaagtctaattacaaatataataatcttatattaaaactcaaataatcttgtattaaaactctaataatcttatattaaaaatctaatagtcatatatgctaagtctaagtgtcgtatattagaacactagataatcaataaaactgtactaatcttgtattaaaactaactctaacaattttatatgctaagcctaagtgtcgtatattagaaccctagataatcatatatgctaagtctaagtgttgtacattagaaccctagataatcatatatgctatgtctaagtgttgtatattaaatctaatagtcttaattacattaaaaatctaacaatcatatctttacatcacttgcctacgcgaattccttcgagggctagctaccactccggcttgagggacgacgacgatgacgtcttttccgtaacatacaaaaaaatgtattagtctaaacgcaaagtaacatatattgtatttcacgtagtgtcatataaagcgaccgttcacgtttcattcacattcgttcacgtttcattcacgttcgttcacgttcgcggtctcgttacattcacgtttcattcacgatcattcacgttcacgttctcattaagtgcacgtttcgttcacgtacgttcattcatgttaacgtacgttaagttcacgtttcgttcacgtacgttcattcgttcatgttcgttcacattcacgttaagttcacgttcgttcacgttcgcgttctcgttaagttcacgtttcgttcatgttaacatatgttaagttcatgtttcgttcacgtacgttcgttcgttcacgattgttcgttaacgttcgttcacgtttcattcacgttcgttctcgttaagttcacgtttcgttcacgttgcggaagcggagcggcggcgtggcggcgcagctgcggcttggcgcggtggcggcgtggcgcggcggcggcgtggcggcggcgtggcggcgtggcggtggcgtgccgtcgcggcggtgtggcgcagcctggcggcatgtcgaggcgggggcggcgacgtggtagtggcatcggcatacgtcgtcggcagtgccggcgtgacgtcgccggcagtggcggccgcatcgaggttggggtcggcatcagcgggaggcggagtcagggtcgaccgcgtcaacgtcggcggcggcgtcggcaacgaggcggcggcggtttggagagagagagagtgagatcgaggtcgagagagagagggaggcggcggcggctctcaccccagagatgcggcggcggcggaggcggcgacgatgacgcccgcgagacgacggcgagatacgacggccgcatcggcgcggggatgccctaggcagtggcggcgaaggagaagccgagatcgatcggggaaaaaacttctaagtgttggtggagaagacgagggcgcgcatcgggaatatatatacccctagatctttaatcttggttggtgagaacaaccgggactaaagatatatttactcccggttgttgagaacaatcgggactaacgataagatctttagtcccggttgttcttacgaaccgggagtaaagatatctttagtcccggttgttctcatcaaccaggactaaagatattttcctgctattttgaaattctttttaaacccggttagggttaagaaccgggactacagataatagtactgaatattgaatttcattacatatgtgtttctaaaatagtaaataatgcattaaaattatttaaagtcaaaaaattaatgacaattacttcgaaaaattattgttgtctgtagtaaattaagtggataaaacgtaataagcaattatatgatttaaactagttaaaaattctaataatcatatataattagcatatgcatgatattaaattgttaaaaattctaattaacatatgtacataccacatgcatgatttaaaattaataaaaattctaataatcatatataattagcatatgcatgatttaaaattgttaaaaattctaattaacatatgtaaatgccacatgcatgatttaaaacttttaaaaattctaattatcgcatataactagcatatgcatgatttaaaattattaaaaattctaataatcatacataattaatatatgccatacaacaattgatttatatggatattcaatacatccaaaatagttcacatcgtgtacacaacaattacggcaatacatcggcgatgacggttgaccgcacgtactttctcctcactattgttccttccttgtgatcgctacgtgagtaaggggtatcttcatttgataggaggatgctagggtcaatcgtcaccgtgaaagggggttgcccatccaactgatcgtaatcctcgtcagtcttgtcctctactccgacgatttttcgtttgcctgggagaaccacgtggcgcttcggctcgtcaggccctttgcccttccttcctttgctagacatatccttcacgtaaatgacttgcattacatcattggcaacgacaaaaggttcatccaagtatccaaccttgttaaggtcaaccgttgtcatcccactttcatcaatcgttacgtctccactagtcaacctaacccattggcaccggaacagagggaccttgagaggaccatagtcaagttcccatatgtcctcgatggcaccgtaatacgtgccagttgttccatcgtgtcccatggcatcgatacgaacaacgctgttttggttcgtgctcttcatgtcttgggctctcgtgtagaatgtgtacccattgatatcatatccctggaatgtcgcgagccagatggtcccctcgctaggaaggccagttattggttgatcgtctcgttacccatgagatgttgtcgtagccacgcggggaaagtatcaatgtgatgccgtgtaatccttgcatcggacttaccgatgtttccggcgcgaactagagccaagtgctcctcgatgtaaggagccaccaatgaagattattgcagaacagtgaaatgggctttacggaataaattgttgtctaccgtcattattgctttccttccgagagtcccctttccccgtagtctcccttcatggcgtgattcaggtaccccgattaggcgaaggtcttaaataaattttacgcaaaatttgatgacctcctttgttccataccccttggcgatgcttgcctctggacgagcacgattacgaacatacttcttcagaacgcctatgtacctctcgaaaggaaacatgttgtgtaggtacacaggcccgagaataccgatctctttgacaaggtgacaaagcagatgcgtcattatattgaaaaataaaggtggaaatatcaactcaaaactgacaagacattgcaccacatcattctgaagggcttctaatctatccggatcgatgaccttctgcgaaattgcgttcatgaaagcacatagttttgttattgttgcccggacattatctggaaggataccccttattacaactggtagcagttgtgtcatcaacacgtgacagtcatgagactttaggtttgtgaacttcttatccttcgtgcttattattcgctttatattcgtggagtatccagacggtaccttgatgctctccaagcattcaaacatactttccttctctgccttgctaagagtgtagctggctggactgaagtaatggcttcctttctcctttggttccgggtgaaggtcgccgcgttgttccatacacttcagatcattacgtgcttccagtgtatctttcgactttccatatacacctaggaagccaagaaggtttacagaaaggttcttagtgaggtgcatcacgtcgattgcgtggcggacatccaagaatccccaacaaggtaactcccaaaatatagagttctttttccacatcgccgcgtgaccatctttgctctctataggctggtttccaggcccctttccaaatactactttaagatctttaaccatagcaaacactgttttcccgctgcaatgtttaggcttcgtacggtggtccgccttatgttcaaagtgcttgcctttcttttgtacctggtggtttgtggcaaggaatcgatgacgacccatgtacacaaccttcctacagtgcttaagattcgtactttctatttcatccatacagtgagtgcaagccttgtaccccttgttggactgcccggaaaggttgctaagtgcaggccaatcgttgatggttacgaacagcagcgctcgtaggtaaaactcctcctgtttgtcctcgtcccacacggggacatcttcctttttccacaacagtttaatatcttcgaccagtggtcttaggtacacatcgatgtcgttaccaggttgcttggggccttgaataataatcggcatcattatgtacttcctcttcatgcatagccaaggggggaggttgtagatacacatcgtaatgggccaactgctatagccgctgctcatctctccaaaaggattcatgccatccgtacttaaaccaaaccgtatgtttcgtgcgtccttttcaaagtctttaaattttctgtcgatgtttcaccactgcgaaccatcggcgaggtgtctcagcatcccgtcctgttgacgttcttcagcgtgccatcgcatcattctagcattccccatgttcctgaacaaacgccttagccgtggtattatagggaaataccacatcaccttagcagtaattctcttctttgttggctgcccgtcaacttcacctggatcctctcgtctaatcttgtatcgtagtgctttgcaaacagggcatgcttctaggttctcgtactcctcaccgcgatataggatacaatcatttggacatgtgtgaatcttctgaacttctagtcctagagggcagactatcttcttagcctcgtacattgtctcgggcaatttgtttccctccggaagaatgttcttgacgagtttcaataaatcgccaaatgccttgtcactaacaccattttttgcctaccattgcaagaactccagagtggtatccaactttttgtgcccctgctcgcaacctgggtacaacgacgttctgtggtcctctaacatccgctccaatttatgggcctccttttcaccttcacagtcctcctttgcgtcctgcaacatctgaccaagatcatccgcagcgttgttatcgccagcatccctgtccacctcgcccatttgatttccttcatatccaacgtactgagcccagttgggaatgttctcgtcctccacttcatcttcttccatttcaaccccttgctcaccgtgagatgtccaacaattatagcttagcatgaaccctgactcaaacaggtggaaatgaatagtcctggatgcagaatactccttttggttcttacacttattgcatggacaacaaataaaaccgtacacttgttagcttcggccactctcaaaaaataatgcacgccctcgataaactctttggaccgccagtcaatgtacatccattgcagatccatctacatgaaatgaaaaaacatcgtacataaataaattttcgtacaataatgacagtcaaacagtaatgataacataattaaaaactctttcgacaagcaattcttattaacaatttttgaagttctaaactaatatttatgttgtacttctcttaattttaaatttagtttgttttctattttttaagattaattttcatcatattttaaactatgagaataaaatttctatatattcttcttccccacacaaattttctctctcatcaacttacaacaaaattttggagacaaataaaaatgtgtgaaacatagctccaaaagtaatataacaacaaaaaacattggaggatgaagttactaaccttttagacacctccaatttgtatataatcactaaaaaaatttcacaaaaaattttggcatgacctcccctctttctttgagaaattttgaagcttgctctcgggctggaggaggaagaaggcacatataaagggggatctttagtcccggttggtgttaccgatctttagccccggttggtaacaccaaccgggactaaagttaggatctttagtcccggttggtaaccgggactaaagatcccgggggccatgacaacgtctgacatctctacaaccgggactaaagatgatct
